(19) United States
(12) Patent Application Publication
(10) Pub. No.: US 2003/0113750 A1
(43) Pub. Date: Jun. 19, 2003

(54) Method and nucleic acids for the differentiation of prostate tumors

(76) Inventors: Juergen Distler, Berlin (DE); Fabian Model, Berlin (DE); Peter Adorjan, Berlin (DE)

Correspondence Address: DAVIDSON, DAVIDSON & KAPPEL, LLC, 485 SEVENTH AVENUE, 14TH FLOOR, NEW YORK, NY, 10018, US

(21) Appl. No.: 10/172,086

(22) Filed: Jun. 13, 2002

(30) Foreign Application Priority Data
Jun. 14, 2001 (DE) 101 28 508.6

(51) Int. Cl. C12Q 1/68; C12P 19/34

(52) U.S. Cl. 435/6; 435/91.2

(57) ABSTRACT

The present invention relates to chemically modified genomic sequences, to oligonucleotides and/or PNA-oligomers for detecting the cytosine methylation state of genomic DNA, as well as to a method for ascertaining genetic and/or epigenetic parameters of genes for use in characterisation, classification, differentiation, diagnosis and therapy of prostate lesions.

### FIELD OF THE INVENTION

[0001] The levels of observation that have been studied by the methodological developments of recent years in molecular biology, are the genes themselves, the translation of these genes into RNA, and the resulting proteins. The question of which gene is switched on at which point in the course of the development of an individual, and how the activation and inhibition of specific genes in specific cells and tissues are controlled is correlatable to the degree and character of the methylation of the genes or of the genome. In this respect, pathogenic conditions may manifest themselves in a changed methylation pattern of individual genes or of the genome.

[0002] The present invention relates to nucleic acids, oligonucleotides, PNA-oligomers, and to a method for characterisation, classification, differentiation, and/or diagnosis of prostate lesions, or the predisposition to prostate cancer, by analysis of the genetic and/or epigenetic parameters of genomic DNA and, in particular, with the cytosine methylation status thereof.

### PRIOR ART

[0003] Prostate cancer is a significant health care problem in Western countries with an incidence of 180 per 100 000 in the U.S. in 1999 (Cancer J Clin 1999;49:8). Different screening strategies are employed to improve early detection, including determination of levels of prostate specific antigen and digital rectal examination. If a prostate carcinoma is suspected in a patient, diagnosis of cancer is confirmed or excluded by the histological and cytological analysis of biopsy samples for features associated with malignant transformation. Particularly early stages of prostate carcinoma are often difficult to distinguish from benign hyperplasia of the prostate by routine histological examination even if an adequate biopsy is obtained (McNeal J E et al., Hum Pathol 2001, 32:441-6). Furthermore, small or otherwise insufficient biopsy samples sometimes impede routine analysis.

[0004] Molecular markers offer the advantage that even samples of very small sizes and samples whose tissue architecture has not been maintained can be analyzed quite efficiently. Within the last decade numerous genes have been shown to be differentially expressed between benign hyperplastic prostate tumors and different grades of prostate cancer. However, no single marker has been shown to be sufficient for the distinction between the two lesions so far. High-dimensional mRNA based approaches have recently been shown to be able to provide a better means to distinguish between different tumor types and benign and malignant lesions. Application as a routine diagnostic tool in a clinical environment is however impeded by the extreme instability of mRNA, the rapidly occurring expression changes following certain triggers (e.g. sample collection), and, most importantly, the large amount of mRNA needed for analysis (Lipshutz, R. J. et al., Nature Genetics 21:20-24, 1999; Bowtell, D. D. L. Nature genetics suppl. 21:25-32, 1999), which often cannot be obtained from a routine biopsy.

[0005] Aberrant DNA methylation within CpG islands is common in human malignancies leading to abrogation or overexpression of a broad spectrum of genes (Jones, P. A. Cancer Res 65:2463-2467, 1996). Abnormal methylation has also been shown to occur in CpG rich regulatory elements in intronic and coding parts of genes for certain tumours (Chan, M. F., et al., Curr Top Microbiol Immunol 249:75-86,2000). Highly characteristic DNA methylation patterns could also be shown for breast cancer cell lines (Huang, T. H.-M., et al., Hum Mol Genet 8:459-470, 1999).

[0006] 5-methylcytosine is the most frequent covalent base modification in the DNA of eukaryotic cells. It plays a role, for example, in the regulation of the transcription, in genetic imprinting, and in tumorigenesis. Therefore, the identification of 5-methylcytosine as a component of genetic information is of considerable interest. However, 5-methylcytosine positions cannot be identified by sequencing since 5-methylcytosine has the same base pairing behavior as cytosine. Moreover, the epigenetic information carried by 5-methylcytosine is completely lost during PCR amplification.

[0007] A relatively new and currently the most frequently used method for analyzing DNA for 5-methylcytosine is based upon the specific reaction of bisulfite with cytosine which, upon subsequent alkaline hydrolysis, is converted to uracil which corresponds to thymidine in its base pairing behavior. However, 5-methylcytosine remains unmodified under these conditions. Consequently, the original DNA is converted in such a manner that methylcytosine, which originally could not be distinguished from cytosine by its hybridization behavior, can now be detected as the only remaining cytosine using “normal” molecular biological techniques, for example, by amplification and hybridization or sequencing. All of these techniques are based on base pairing which can now be fully exploited. In terms of sensitivity, the prior art is defined by a method which encloses the DNA to be analyzed in an agarose matrix, thus preventing the diffusion and renaturation of the DNA (bisulfite only reacts with single-stranded DNA), and which replaces all precipitation and purification steps with fast dialysis (Olek A, Oswald J, Walter J. A modified and improved method for bisulphite based cytosine methylation analysis. Nucleic Acids Res. Dec. 15, 1996; 24(24):5064-6, herein incorporated by reference). Using this method, it is possible to analyze individual cells, which illustrates the potential of the method. However, currently only individual regions of a length of up to approximately 3000 base pairs are analyzed, a global analysis of cells for thousands of possible methylation events is not possible. However, this method cannot reliably analyze very small fragments from small sample quantities either. These are lost through the matrix in spite of the diffusion protection.

[0008] An overview of the further known methods of detecting 5-methylcytosine may be gathered from the following review article: Rein, T., DePamphilis, M. L., Zorbas, H., Nucleic Acids Res. 1998, 26, 2255, herein incorporated by reference.

[0009] To date, barring few exceptions (e.g., Zeschnigk M, Lich C, Buiting K, Doerfler W, Horsthemke B. A single-tube PCR test for the diagnosis of Angelman and Prader-Willi syndrome based on allelic methylation differences at the SNRPN locus. Eur J Hum Genet. March-April 1997; 5(2):94-8) the bisulfite technique is only used in research. Always, however, short, specific fragments of a known gene are amplified subsequent to a bisulfite treatment and either completely sequenced (Olek A, Walter J. The pre-implantation ontogeny of the H19 methylation imprint. Nat Genet. November 1997; 17(3):275-6) or individual cytosine positions are detected by a primer extension reaction (Gonzalgo M L, Jones P A. Rapid quantitation of methylation differences at specific sites using methylation-sensitive single nucleotide primer extension (Ms-SNuPE). Nucleic Acids Res. Jun. 15, 1997; 25(12):2529-31, WO 95/00669, herein incorporated by reference) or by enzymatic digestion (Xiong Z, Laird P W. COBRA: a sensitive and quantitative DNA methylation assay. Nucleic Acids Res. Jun. 15, 1997; 25(12):2532-4, herein incorporated by reference). In addition, detection by hybridization has also been described (Olek et al., WO 99/28498, herein incorporated by reference).

[0010] Further publications dealing with the use of the bisulfite technique for methylation detection in individual genes are: Grigg G, Clark S. Sequencing 5-methylcytosine residues in genomic DNA. Bioessays. 1994 June;16(6):431-6, 431; Zeschnigk M, Schmitz B, Dittrich B, Buiting K, Horsthemke B, Doerfler W. Imprinted segments in the human genome: different DNA methylation patterns in the Prader-Willi/Angelman syndrome region as determined by the genomic sequencing method. Hum Mol Genet. March 1997; 6(3):387-95; Feil R, Charlton J, Bird A P, Walter J, Reik W. Methylation analysis on individual chromosomes: improved protocol for bisulphite genomic sequencing. Nucleic Acids Res. Feb. 25, 1994; 22(4):695-6; Martin V, Ribieras S, Song-Wang X, Rio M C, Dante R. Genomic sequencing indicates a correlation between DNA hypomethylation in the 5′ region of the pS2 gene and its expression in human breast cancer cell lines. Gene. May 19, 1995; 157(1-2):261-4; WO 97/46705, WO 95/15373 and WO 97/45560.

[0011] An overview of the Prior Art in oligomer array manufacturing can be gathered from a special edition of Nature Genetics (Nature Genetics Supplement, Volume 21, January 1999), published in January 1999, and from the literature cited therein.

[0012] Fluorescently labeled probes are often used for the scanning of immobilized DNA arrays. The simple attachment of Cy3 and Cy5 dyes to the 5′-OH of the specific probe are particularly suitable for fluorescence labels. The detection of the fluorescence of the hybridized probes may be carried out, for example via a confocal microscope. Cy3 and Cy5 dyes, besides many others, are commercially available.

[0013] Matrix Assisted Laser Desorption Ionization Mass Spectrometry (MALDI-TOF) is a very efficient development for the analysis of biomolecules (Karas M, Hillenkamp F. Laser desorption ionization of proteins with molecular masses exceeding 10,000 daltons. Anal Chem. Oct. 15, 1988; 60(20):2299-301). An analyte is embedded in a light-absorbing matrix. The matrix is evaporated by a short laser pulse thus transporting the analyte molecule into the vapor phase in an unfragmented manner. The analyte is ionized by collisions with matrix molecules. An applied voltage accelerates the ions into a field-free flight tube. Due to their different masses, the ions are accelerated at different rates. Smaller ions reach the detector sooner than bigger ones.

[0014] MALDI-TOF spectrometry is excellently suited to the analysis of peptides and proteins. The analysis of nucleic acids is somewhat more difficult (Gut I G, Beck S. DNA and Matrix Assisted Laser Desorption Ionization Mass Spectrometry. Current Innovations and Future Trends. 1995, 1; 147-57). The sensitivity to nucleic acids is approximately 100 times worse than to peptides and decreases disproportionally with increasing fragment size. For nucleic acids having a multiply negatively charged backbone, the ionization process via the matrix is considerably less efficient. In MALDI-TOF spectrometry, the selection of the matrix plays an eminently important role. For the desorption of peptides, several very efficient matrixes have been found which produce a very fine crystallization. There are now several responsive matrixes for DNA, however, the difference in sensitivity has not been reduced. The difference in sensitivity can be reduced by chemically modifying the DNA in such a manner that it becomes more similar to a peptide. Phosphorothioate nucleic acids in which the usual phosphates of the backbone are substituted with thiophosphates can be converted into a charge-neutral DNA using simple alkylation chemistry (Gut I G, Beck S. A procedure for selective DNA alkylation and detection by mass spectrometry. Nucleic Acids Res. Apr. 25, 1995; 23(8):1367-73). The coupling of a charge tag to this modified DNA results in an increase in sensitivity to the same level as that found for peptides. A further advantage of charge tagging is the increased stability of the analysis against impurities which make the detection of unmodified substrates considerably more difficult.

[0015] Genomic DNA is obtained from DNA of cell, tissue or other test samples using standard methods. This standard methodology is found in references such as Fritsch and Maniatis eds., Molecular Cloning: A Laboratory Manual, 1989.

### DESCRIPTION

[0016] The disclosed invention provides a method and nucleic acids for the differentiation of prostate tumors. It discloses a means of distinguishing benign prostate hyperplasia from prostate carcinoma. This provides a means for the early detection and treatment of prostate cancer. Furthermore, the disclosed invention presents improvements over the state of the art in that current methods of prostate lesion differential diagnosis require the provision of a sample of sufficient size for histological and cytological examination. The method according to the present invention can be used for classification of minute samples.

[0017] The invention provides the chemically modified genomic DNA, as well as oligonucleotides and/or PNA-oligomers for detecting cytosine methylations, as well as a method which is particularly suitable for the classification, differentiation and/or diagnosis of prostate tumors, or the predisposition to prostate cancer. The present invention is based on the discovery that genetic and epigenetic parameters and, in particular, the cytosine methylation patterns of genomic DNA are particularly suitable for classification, differentiation and/or diagnosis of prostate tumors, in particular for use in differential diagnosis of prostate cancer.

[0018] This objective is achieved according to the present invention providing a nucleic acid containing a sequence of at least 18 bases in length of the chemically pretreated genomic DNA according to one of Seq. ID No.1 through Seq. ID No.112, and sequences complementary thereto.

[0019] The chemically modified nucleic acid could heretofore not be connected with the ascertainment of disease relevant genetic and epigenetic parameters.

[0020] The object of the present invention is further achieved by an oligonucleotide or oligomer for detecting the cytosine methylation state in chemically pretreated DNA, containing at least one base sequence having a length of at least 9 to 13 nucleotides which hybridizes to a chemically pretreated genomic DNA according to Seq. ID No.1 through Seq. ID No.112. The oligomer probes according to the present invention constitute important and effective tools which, for the first time, make it possible to ascertain specific genetic and epigenetic parameters of carcinomas, in particular, for use in differential diagnosis of prostate tumors and for diagnosis of predisposition to prostate carcinomas. The base sequence of the oligomers preferably contains at least one CpG dinucleotide. The probes may also exist in the form of a PNA (peptide nucleic acid) which has particularly preferred pairing properties. Particularly preferred are oligonucleotides according to the present invention in which the cytosine of the CpG dinucleotide is the 5^{th}-9^{th} nucleotide from the 5′-end of the 13-mer; in the case of PNA-oligomers, it is preferred for the cytosine of the CpG dinucleotide to be the 4^{th}-6^{th} nucleotide from the 5′-end of the 9-mer.

[0021] The oligomers according to the present invention are normally used in so called “sets” which contain at least one oligomer for each of the CpG dinucleotides of the sequences of Seq. ID No.1 through Seq. ID No.112. Preferred is a set which contains at least one oligomer for each of the CpG dinucleotides from one of Seq. ID No.1 through Seq. ID No.112.

[0022] Moreover, the present invention makes available a set of at least two oligonucleotides which can be used as so-called “primer oligonucleotides” for amplifying DNA sequences of one of Seq. ID No.1 through Seq. ID No.112, or segments thereof, for example using PCR.

[0023] In the case of the sets of oligonucleotides according to the present invention, it is preferred that at least one oligonucleotide is bound to a solid phase. It is further preferred that all the oligonucleotides of one set are bound to a solid phase.

[0024] The present invention moreover relates to a set of at least 10 n (oligonucleotides and/or PNA-oligomers) used for detecting the cytosine methylation state in chemically pretreated genomic DNA (Seq. ID No.1 through Seq. ID No.112). These probes enable classification, differentiation and/or diagnosis of genetic and epigenetic parameters of tumors, which are particularly useful in differential diagnosis of prostate cancer. Furthermore, the probes enable the diagnosis of predisposition to prostate cancer. The set of oligomers may also be used for detecting single nucleotide polymorphisms (SNPs) in chemically pretreated genomic DNA according to one of Seq. ID No.1 through Seq. ID No.112.

[0025] According to the present invention, it is preferred that an arrangement of different oligonucleotides and/or PNA-oligomers (a so-called “array”) made available by the present invention is present in a manner that it is likewise bound to a solid phase. This array of different oligonucleotide- and/or PNA-oligomer sequences can be characterized in that it is arranged on the solid phase in the form of a rectangular or hexagonal lattice. The solid phase surface is preferably composed of silicon, glass, polystyrene, aluminum, steel, iron, copper, nickel, silver, or gold. However, nitrocellulose as well as plastics such as nylon which can exist in the form of pellets or also as resin matrices are possible as well.

[0026] Therefore, a further subject matter of the present invention is a method for manufacturing an array fixed to a carrier material for the classification, differentiation and/or diagnosis of prostate tumors, in particular, differential diagnosis of prostate cancer or for the classification, differentiation and/or diagnosis of prostate lesions or the predisposition to prostate carcinoma and/or for the therapy of prostate carcinoma, in which method at least one oligomer according to the present invention is coupled to a solid phase. Methods for manufacturing such arrays are known, for example, from U.S. Pat. No. 5,744,305 (herein incorporated by reference) by means of solid-phase chemistry and photolabile protecting groups.

[0027] A further subject matter of the present invention relates to a DNA chip for the classification, differentiation and/or diagnosis of prostate tumors, in particular, differential diagnosis of prostate cancer or for the classification, differentiation and/or diagnosis of prostate lesions or the predisposition to prostate carcinoma and/or for the therapy of prostate carcinoma. Furthermore the DNA chip enables the diagnosis of predisposition to prostate carcinomas. The DNA chip contains at least one nucleic acid according to the present invention. DNA chips are known, for example, for U.S. Pat. No. 5,837,832, incorporated herein by reference.

[0028] Moreover, a subject matter of the present invention is a kit which may be composed, for example, of a bisulfite-containing reagent, a set of primer oligonucleotides containing at least two oligonucleotides whose sequences in each case correspond or are complementary to an 18 base long segment of the base sequences specified in the appendix (Seq. ID No.1 through Seq. ID No.112), oligonucleotides and/or PNA-oligomers as well as instructions for carrying out and evaluating the described method. However, a kit along the lines of the present invention can also contain only part of the aforementioned components. Preferred is a kit, wherein the additional standard methylation assay reagents are standard reagents for performing a methylation assay from the group consisting of MS-SNuPE, COBRA, and combinations thereof.

[0029] The present invention also makes available a method for ascertaining genetic and/or epigenetic parameters of genomic DNA. The method is for use in the classification, differentiation and/or diagnosis of prostate tumors, in particular for the differential diagnosis of prostate cancer and diagnosis of predisposition to prostate cancer. The method enables the analysis of cytosine methylations and single nucleotide polymorphisms, including the following steps:

[0030] In the first step of the method the genomic DNA sample must be isolated (i.e. obtained) from tissue or cellular sources. Such sources may include cell lines, histological slides, body fluids, for example blood, sputum, faeces, urine, cerebrospinal fluid, lymphatic fluid tissue embedded in paraffin; for example, prostate or lymphatic tissue. Extraction may be by means that are standard to one skilled in the art, these include the use of detergent lysates, sonification and vortexing with glass beads. Once the nucleic acids have been extracted the genomic double stranded DNA is used in the analysis.

[0031] In a preferred embodiment the DNA may be cleaved prior to the chemical treatment, this may be any means standard in the state of the art, in particular with restriction endonucleases.

[0032] In the second step of the method, the genomic DNA sample is chemically treated in such a manner that cytosine bases which are unmethylated at the 5′-position are converted to uracil, thymine, or another base which is dissimilar to cytosine in terms of hybridization behavior. This will be herein understood as “chemical pretreatment”.

[0033] The above described treatment of genomic DNA is preferably carried out with bisulfite (sulfite, disulfite) and subsequent alkaline hydrolysis which results in a conversion of non-methylated cytosine nucleobases to uracil or to another base which is dissimilar to cytosine in terms of base pairing behavior.

[0034] Fragments of the chemically pretreated DNA are amplified, using sets of primer oligonucleotides according to the present invention, and a, preferably heat-stable polymerase. Because of statistical and practical considerations, preferably more than ten different fragments having a length of 100-2000 base pairs are amplified. The amplification of several DNA segments can be carried out simultaneously in one and the same reaction vessel. Usually, the amplification is carried out by means of a polymerase chain reaction (PCR).

[0035] In a preferred embodiment of the method, the set of primer oligonucleotides includes at least two olignonucleotides whose sequences are each reverse complementary or identical to an at least 18 base-pair long segment of the base sequences specified in the appendix (Seq. ID No.1 through Seq. ID No.112). The primer oligonucleotides are preferably characterized in that they do not contain any CpG dinucleotides. In a particularly preferred embodiment of the method, the sequence of said primer oligonucleotides are designed so as to selectively anneal to and amplify, only the prostate specific DNA of interest, thereby minimizing the amplification of background or non relevant DNA, i.e. that the amplification step preferentially amplifies DNA which is of particularly interest in prostate cells, based on the specific genomic methylation status of prostate cells, as opposed to background DNA. In the context of the present invention, background DNA is taken to mean genomic DNA which does not have a relevant tissue specific methylation pattern, in this case the relevant tissue being prostate and prostate carcinoma tissue. Examples of such primers, used in Example 2, are contained in Table 1. The amplification of several DNA segments can be carried out in one reaction vessel using a polymerase is a heat-resistant DNA polymerase.

[0036] According to the present invention, it is preferred that at least one primer oligonucleotide is bonded to a solid phase during amplification. The different oligonucleotide and/or PNA-oligomer sequences can be arranged on a plane solid phase in the form of a rectangular or hexagonal lattice, the solid phase surface preferably being composed of silicon, glass, polystyrene, aluminium, steel, iron, copper, nickel, silver, or gold, it being possible for other materials such as nitrocellulose or plastics to be used as well.

[0037] In a next preferred step of the method, the methylation status of one or more cytosine positions is identified. This can be done in a number of ways that are generally known to the person skilled in the art. Some methods are described in more detail, below.

[0038] The fragments obtained by means of the amplification can carry a directly or indirectly detectable label. Preferred are labels in the form of fluorescence labels, radionuclides, or detachable molecule fragments having a typical mass which can be detected in a mass spectrometer, it being preferred that the fragments that are produced have a single positive or negative net charge for better detectability in the mass spectrometer. The detection may be carried out and visualized by means of matrix assisted laser desorption/ionization mass spectrometry (MALDI) or using electron spray mass spectrometry (ESI).

[0039] In a preferred embodiment, the amplificates obtained in the second step of the method are subsequently hybridized to an array or a set of oligonucleotides and/or PNA probes. In this context, the hybridization takes place in the manner described in the following. The set of probes used during the hybridization is preferably composed of at least 10 oligonucleotides or PNA-oligomers. In the process, the amplificates serve as probes which hybridize to oligonucleotides previously bonded to a solid phase. The non-hybridized fragments are subsequently removed. Said oligonucleotides contain at least one base sequence having a length of 13 nucleotides which is reverse complementary or identical to a segment of the base sequences specified in the appendix, the segment containing at least one CpG dinucleotide. The cytosine of the CpG dinucleotide is the 5^{th} to 9^{th} nucleotide from the 5′-end of the 13-mer. One oligonucleotide exists for each CpG dinucleotide. Said PNA-oligomers contain at least one base sequence having a length of 9 nucleotides which is reverse complementary or identical to a segment of the base sequences specified in the appendix, the segment containing at least one CpG dinucleotide. The cytosine of the CpG dinucleotide is the 4^{th} to 6^{th} nucleotide seen from the 5′-end of the 9-mer. Preferably one oligonucleotide exists for each CpG dinucleotide.

[0040] In the fifth step of the method, the non-hybridized amplificates are removed.

[0041] In the final step of the method, the hybridized amplificates are detected. In this context, it is preferred that labels attached to the amplificates are identifiable at each position of the solid phase at which an oligonucleotide sequence is located. In this final step, also an analysis of the methylation status of the cytosine positions by reference to one or more data sets can be present.

[0042] According to the present invention, it is preferred that the labels of the amplificates are fluorescence labels, radionuclides, or detachable molecule fragments having a typical mass which can be detected in a mass spectrometer. The mass spectrometer is preferred for the detection of the amplificates, fragments of the amplificates or of probes which are complementary to the amplificates, it being possible for the detection to be carried out and visualized by means of matrix assisted laser desorption/ionization mass spectrometry (MALDI) or using electron spray mass spectrometry (ESI). The produced fragments may have a single positive or negative net charge for better detectability in the mass spectrometer.

[0043] The aforementioned method is preferably used for ascertaining genetic and/or epigenetic parameters of genomic DNA.

[0044] The oligomers according to the present invention or arrays thereof as well as a kit according to the present invention are intended to be used for the classification, differentiation and/or diagnosis of prostate tumors. More preferably for the differential diagnosis of prostate tumors, or diagnosis of predisposition to prostate cancer. According to the present invention, the method is preferably used for classification, differentiation and/or diagnosis of important genetic and/or epigenetic parameters within genomic DNA, in particular for use in differential diagnosis of prostate tumors and predisposition to prostate cancer.

[0045] The method according to the present invention is used, for example, for classification, differentiation and/or diagnosis of prostate tumors.

[0046] The nucleic acids according to the present invention of Seq. ID No.1 through Seq. ID No.112 can be used for classification, differentiation and/or diagnosis of genetic and/or epigenetic parameters of genomic DNA, in particular for use in differential diagnosis of prostate tumors.

[0047] The present invention moreover relates to a method for manufacturing a diagnostic reagent and/or therapeutic agent for classification, differentiation and/or diagnosis of prostate tumours and cancer by analyzing methylation patterns of genomic DNA. More preferrably for use in differential diagnosis of prostate tumors. The diagnostic reagent and/or therapeutic agent being characterized in that at least one nucleic acid according to the present invention (sequence IDs 1 through 112) is used for manufacturing it, preferably together with suitable additives and auxiliary agents.

[0048] A further subject matter of the present invention relates to a diagnostic reagent and/or therapeutic agent for prostate cancer by analyzing methylation patterns of genomic DNA, in particular for use in differential diagnosis of prostate tumors, or diagnosis of the predisposition to prostate cancer, the diagnostic reagent and/or therapeutic agent containing at least one nucleic acid according to the present invention (sequence IDs 1 through 112), preferably together with suitable additives and auxiliary agents.

[0049] The present invention moreover relates to the diagnosis and/or prognosis of events which are disadvantageous to patients or individuals in which important genetic and/or epigenetic parameters within genomic DNA, said parameters obtained by means of the present invention may be compared to another set of genetic and/or epigenetic parameters, the differences serving as the basis for a diagnosis and/or prognosis of events which are disadvantageous to patients or individuals.

[0050] In the context of the present invention the term “hybridization” is to be understood as a bond of an oligonucleotide to a completely complementary sequence along the lines of the Watson-Crick base pairings in the sample DNA, forming a duplex structure.

[0051] The term “functional variants” denotes all DNA sequences which are complementary to a DNA sequence, and which hybridize to the reference sequence under stringent conditions.

[0052] In the context of the present invention, “genetic parameters” are mutations and polymorphisms of genomic DNA and sequences further required for their regulation. To be designated as mutations are, in particular, insertions, deletions, point mutations, inversions and polymorphisms and, particularly preferred, SNPs (single nucleotide polymorphisms).

[0053] In the context of the present invention, “epigenetic parameters” are, in particular, cytosine methylations and further chemical modifications of DNA bases of genomic DNA and sequences further required for their regulation. Further epigenetic parameters include, for example, the acetylation of histones which, cannot be directly analyzed using the described method but which, in turn, correlates with the DNA methylation.

[0054] In the following, the present invention will be explained in greater detail on the basis of the sequences and examples with respect to the attached drawing without being limited thereto.

### DESCRIPTION OF FIGURE

[0055] FIG. 1

[0056] FIG. 1 shows the separation of benign prostate hyperplasia (1) and prostate carcinoma (2). High probability of methylation corresponds to red, uncertainty to black and low probability to green. The labels on the left side of the plot are gene and CpG identifiers. The labels on the right side give the significance (p-value) of the difference between the means of the two groups. Each row corresponds to a single CpG and each column to the methylation levels of one sample. CpGs are ordered according to their contribution to the distinction to the differential diagnosis of the two lesions with increasing contribution from top to bottom.

[0057] Seq. ID No.1 trough Seq. ID No.112

[0058] Sequences having odd sequence numbers (e.g., Seq. ID No. 1, 3, 5, . . . ) exhibit in each case sequences of chemically pretreated genomic DNAs. Sequences having even sequence numbers (e.g., Seq. ID No. 2, 4, 6, . . . ) exhibit in each case the sequences of the chemically pretreated genomic DNAs which are complementary to the preceding sequences (e.g., the complementary sequence to Seq. ID No.1 is Seq. ID No.2, the complementary sequence to Seq. ID No.3 is Seq. ID No.4, etc.).

[0059] Seq. ID No.113 trough Seq. ID No.116

[0060] Seq. ID No.113 trough Seq. ID No.116 show sequences of oligonucleotides used in Example 1.

[0061] The following example relates to a fragment of a gene, in this case, TGF-alpha in which a specific CG-position is analyzed for its methylation status.

### EXAMPLE 1

### Methylation Analysis of the Gene TGF-alpha

[0062] The following example relates to a fragment of the gene TGF-alpha in which a specific CG-position is to be analyzed for methylation.

[0063] In the first step, a genomic sequence is treated using bisulfite (hydrogen sulfite, disulfite) in such a manner that all cytosines which are not methylated at the 5-position of the base are modified in such a manner that a different base is substituted with regard to the base pairing behavior while the cytosines methylated at the 5-position remain unchanged.

[0064] If bisulfite solution is used for the reaction, then an addition takes place at the non-methylated cytosine bases. Moreover, a denaturating reagent or solvent as well as a radical interceptor must be present. A subsequent alkaline hydrolysis then gives rise to the conversion of non-methylated cytosine nucleobases to uracil. The chemically converted DNA is then used for the detection of methylated cytosines. In the second method step, the treated DNA sample is diluted with water or an aqueous solution. Preferably, the DNA is subsequently desulfonated. In the third step of the method, the DNA sample is amplified in a polymerase chain reaction, preferably using a heat-resistant DNA polymerase. In the present case, cytosines of the gene TGF-alpha are analyzed. To this end, a defined fragment having a length of 531 bp is amplified with the specific primer oligonucleotides GGTTTGTTTGGGAGGTAAG (Sequence ID 113) and CCCCCTAAAAACACAAAA (Sequence ID No. 114). This amplificate serves as a sample which hybridizes to an oligonucleotide previously bound to a solid phase, forming a duplex structure, for example GTTTTTTTCGTTTTAGAG (Sequence ID No. 115), the cytosine to be detected being located at position 188 of the amplificate. The detection of the hybridization product is based on Cy3 and Cy5 fluorescently labelled primer oligonucleotides which have been used for the amplification. A hybridization reaction of the amplified DNA with the oligonucleotide takes place only if a methylated cytosine was present at this location in the bisulfite-treated DNA. Thus, the methylation status of the specific cytosine to be analyzed is inferred from the hybridization product.

[0065] In order to verify the methylation status of the position, a sample of the amplificate is further hybridized to another oligonucleotide previously bonded to a solid phase. Said olignonucleotide is identical to the oligonucleotide previously used to analyze the methylation status of the sample, with the exception of the position in question. At the position to be analysed said oligonucleotide comprises a thymine base as opposed to a cytosine base i.e GTTTTTTTTGTTTTAGAG (Sequence ID No. 116). Therefore, the hybridisation reaction only takes place if an unmethylated cytosine was present at the position to be analysed.

### EXAMPLE 2

### Differentiation of Prostate Tumors

[0066] In order to relate the methylation patterns to a specific tumour type, it is initially required to analyze the DNA methylation patterns of two groups of patients with alternative forms of a tumor, in this case one group of benign prostate hyperplasia and another group of prostate carcinoma. These analyses were carried out, analogously to Example 1. The results obtained in this manner are stored in a database and the CpG dinucleotides which are methylated differently between the two groups are identified. This can be carried out by determining individual CpG methylation rates as can be done, for example, by sequencing, which is a relatively imprecise method of quantifying methylation at a specific CpG, or else, in a very precise manner, by a methylation-sensitive “primer extension reaction”. In a particularly preferred variant the methylation status of hundreds or thousands of CpGs may be analysed on an oligomer array. It is also possible for the patterns to be compared, for example, by clustering analyses which can be carried out, for example, by a computer.

[0067] All clinical specimens were obtained at time of surgery, i.e. in a routine clinical situation (Santourlidis, S., Prostate 39:166-174, 1999, Florl, A. R., Br. J. Cancer 80:1312-1321, 1999). A panel of genomic fragments from 56 different genes (listed in Table 1) were bisulphite treated according to Example I and amplified by PCR. The genomic DNA was amplified using the primer pairs listed in Table 1. However, as will be obvious to one skilled in the art, it is also possible to use other primers that amplify the genomic in an adequate manner, the design of such primers will be obvious to one skilled in the art. However the primer pairs as listed in Table 1 are particularly preferred. Optimal results were obtained by including at least 8 CpG dinucleotides, the most informative CpG positions for this discrimination being located within the TGF-alpha and POMC genes. Most other CpGs of the panel showed different methylation patterns between the two phenotypes, too. The results prove that methylation fingerprints are capable of providing differential diagnosis of solid malignant tumours and could therefore be applied in a large number clinical situations. FIG. 1 shows the application of the described method to distinguish benign prostate hyperplasia from prostate carcinoma.

TABLE 1
List of genes and primer oligonucleotides according to
Example 2

| | Genbank Entry | | |
|---|---|---|---|
| | No. (internet | | |
| | address: | | |
| | ttp://www.ncb | | |
| Name | i.nlm.nih.gov) | Primer 1 | Primer 2 |
| ADCYA | NM_001117 | GGTGGATTTATGGTTATT | TCCCTCCCTTACCCTTC |
| P1 | | TTG | AAC |
| AFP | NM_001134 | AGGTTTATTGAATATTTA | AACATATTTCCACAAC |
| | | GG | ATCC |
| APOA1 | NM_000039 | GTTGGTGGTGGGGGAGG | ACAACCAAAATCTAAA |
| | | TAG | CTAA |
| APOC2 | NM_000483 | ATGAGTAGAAGAGGTGA | CCCTAAATCCCTTTCTT |
| | | TAT | ACC |
| ATP5A1 | NM_004046 | AGTTTGTTTTAATTTATT | AACAACATCTTTACAA |
| | | GATAGGA | TTACTCC |
| ATP5G1 | NM_005175 | TGATAGTTTATGATTGTT | AATCTCAACCCTCAAC |
| | | GA | TTCC |
| ATP6 | NC_001807 | GGGTATTAGGAATTTAT | CAAAACACCTTCCTAA |
| | | GTG | CTCA |
| C4B | NM_000592 | ATTGATAGGTAGTTAGA | AAAAAACTCTCATAAA |
| | | TTGG | TCTCA |
| c-ab1 | NM_007313 | GGTTGGGAGATTTAATTT ACCAATCCAAACTTTT | |
| | | TATT | CCTT |
| CD1R3 | NM_001766 | ATTATGGTTGGAATTGTA | ACAAAAACAACAAAC |
| | | AT | ACCCC |
| CDC25A NM_001789 | AGAAGTTGTTTATTGATT | AAAATTAAATCCAAAC | |
| | | GG | AAAC |
| CDH3 | NM_001793 | GTTTAGAAGTTTAAGATT | CAAAAACTCAACCTCT |
| | | AG | ATCT |
| c-fos | NM_005252 | TTTTGAGTTTTAGAATTG | AAAAACCCCCTACTCA |
| | | TTTTTAG | TCTACTA |
| c-MOS | NM_005372 | TTTATTGATTGGGAGTAG | CTAATTTTACAAACAT |
| | | GT | CCTA |
| c-myc | NM_002467 | AAAGGTTTGGAGGTAGG | TTCCTTTCCAAATGCTC |
| | | AGT | TTT |
| CRIP1 | NM_001311 | TTTAGGTTTAGGGTTTAG | CCACTCCAAAACTAAT |
| | | TT | ATCA |
| CSF1 | NM_000757 | TAGGGTTTGGAGGGAAA | AAAAATCACCCTAACC |
| | | G | AAAC |
| CSNK2B | NM_001320 | GGGGAAATGGAGAAGTG | CTACCAATCCCAAAAT |
| | | TAA | AACC |
| CTLA4 | NM_005214 | TTTTTATGGAGAGTAGTT | TAACTTTACTCACCAA |
| | | GG | TTAC |
| DAD1 | NM_001344 | TTTTGTTGTTAGAGTAAT | ACCTCAATTTCCCCAT |
| | | TG | TCAC |
| DAPK1 | NM_004938 | ATTAATATTATGTAAAGT | CTTACAACCATTCACC |
| | | GA | CACA |
| DBCCR1 | NM_014618 | ATTTGGAGTTGAAGTATT | AACTATACCCAAACAC |
| | | TG | CTAC |
| EGFR | NM_005228 | GGGTAGTGGGATATTTA | CCAACACTACCCCTCT |
| | | GTTTTT | AA |
| EGR4 | NM_001965 | AGGGGGATTGAGTGTTA | CCCAAACATAAACACA |
| | | AGT | AAAT |
| ELK1 | NM_005229 | AAGTGTTTTAGTTTTTAA | CAAACCCAAAACTCAC |
| | | TGGGTA | CTAT |
| ERBB2 | NM_004448 | GAGTGATATTTTTATTTT | AAAACCCTAACTCAAC |
| | | ATGTTTGG | TACTCAC |
| G6E | NM_024123 | AGGTTGGATTTTGGGTA | TCTCCTACTCTCCTAAT |
| | | GGT | CTC |
| GP1BB | NM_000407 | GGTGATAGGAGAATAAT | TCTCCCAACTACAACC |
| | | GTTGG | AAAC |
| HLA- | NM_002119 | GAGGTTAAAGGAAGTTT | AAACTAAATTCTCCCA |
| DNA | | TGGA | ATACC |
| HLA-F | NM_018950 | TTGTTGTTTTTAGGGGTT | TCCTTCCCATTCTCCAA |
| | | TTGG | ATATC |
| MLH1 | NM_000249 | TTTAAGGTAAGAGAATA | TTAACCCTACTCTTAT |
| | | GGT | AACC |
| HSPA2 | NM_021979 | AGAGGAGATATTTTTTAT | AAAAATCCTACAACAA |
| | | GG | CTTC |
| | | or | or |
| | | AAGGATAATAATTTGTT | CTTAAATACAAACTTA |
| | | GGG | ATCC |
| IL13 | NM_002188 | TTTTTAGGGTAGGGGTTG | CCTTATCCCCCATAAC |
| | | T | CA |
| 1-myc | NM_005377 | AGGTTTGGGTTATTGAGT | CATTATTTCCTAACTA |
| | | TT | CCTTATATCTC |
| MC2R | NM_000529 | ATATTTGATATGTTGGGT | ACCTACTACAAAAAAT |
| | | AG | CATC |
| ME491/C | NM_001780 | TGGGAGATATTTAGGAT | CTCACCTAAACTTCCC |
| D63 | | GTGA | AAA |
| MGMT | NM_002412 | TTGTGAGGTATTGGGAG | ACCCAAACACTCACCA |
| | | TTAG | AAT |
| MRP5 | NM_005688 | ATGAGGTGGGAGGATTG | CATCCAAAATTCTAAA |
| | | TTT | CTAA |
| N33 | NM_006765 | TGGAGGAGATATTGTTTT | TTTTTCAAATCAAAAC |
| | | GT | CCTACT |
| NCL | NM_005381 | AAGTTGTGTTTTTAAAAG | AAAAACTAAACCTACC |
| | | GGTTA | CAATAA |
| NEU1 | NM_016215 | AGGAGGAAGGGTTAATA | ATCTTCCTACTACTATC |
| | | AAGA | TCTAAC |
| NF1 | NM_000267 | TTGGGAGAAAGGTTAGT | ATCCAAACTCCCAATA |
| | | TTT | TTCC |
| n-myc | NM_005378 | GGAGGAGTATATTTTGG | ACAAACCCTACTCCTT |
| | | GTTT | ACCTC |
| OAT | NM_000274 | TGGAGGTGGATTTAGAG | ACCAAAACCCCAAAAC |
| | | GTA | AA |
| POMC | NM_000939 | AGTTTTTAAATAATGGG | ACTCTTCTTCCCCTCCT |
| | | GAAAT | TC |
| PGR | NM_000926 | AGTTGAAGTTATAAGGG | AATAAAAACTCTCAAA |
| | | GTG | AACC |
| RD | NM_002904 | AAGAGTGAGAAGTAGAG | CTACTCTCTAAAACTC |
| | | GGTT | CAAAC |
| SOD1 | NM_000454 | AGGGGAAGAAAAGGTAA | CCCACTCTAACCCCAA |
| | | GTT | ACCA |
| TGFA | NM_003236 | GGTTTGTTTGGGAGGTA | CCCCCTAAAAACACAA |
| | | AG | AA |
| TGFB1 | NM_000660 | GGGGAGTAATATGGATT | CCTTTACTAAACACCT |
| | | TGG | CCCATA |
| TNF-beta | X02911 | TTTTTGTTTTTGATTGAA | AAAAACCCCAAAATA |
| | | ATAGTAG | AACAA |
| TSP | NM_003246 | TGGTATTTTTGAGGTAGA | CCCTATCTTCCTACAC |
| | | TG | AAAC |
| UBB | NM_018955 | TTAAGTTATTTTAGGTGG | ACCAAAATCCTACCAA |
| | | AGTTTA | TCAC |
| UNG | NM_003362 | GTTGGGGTGTTTGAGGA | CCTCTCCCCTCTAATTA |
| | | A | AACA |
| VEGF | NM_003376 | TGGGTAATTTTTAGGTTG | CCCCAAAAACAAATCA |
| | | TGA | CTC |
| WT1 | NM_000378 | AAAGGGAAATTAAGTGT | TAACTACCCTCAACTT |
| | | TGT | CCC |

What is claimed:

1. A method for determining genetic and/or epigenetic parameters for the classification, differentiation and/or diagnosis of prostate tumours or the predisposition to prostate cancer by analysing cytosine methylations, characterised in that the following steps are carried out:
a. obtaining a biological sample containing genomic DNA
b. extracting the genomic DNA
c. in the genomic DNA sample, cytosine bases which are unmethylated at the 5-position are converted, by chemical treatment, to uracil or another base which is dissimilar to cytosine in terms of hybridisation behaviour; and
d. amplifying at least one fragment of the chemically pretreated genomic DNA using sets of primer oligonucleotides and a polymerase,
wherein the genomic CpG sequences are located within at least one of the chemically pretreated genomic sequences according to Seq. ID No.1 to Seq. ID No.112, and sequences complementary thereto.

2. Method according to claim 1, further comprising the following steps:
Identification of the methylation status of one or more cytosine positions; and
Analysis of the methylation status of the cytosine positions by reference to one or more data sets.

3. Method according to claim 1, wherein the amplification of the fragments of the chemically pretreated genomic DNA using sets of primer oligonucleotides and a polymerase is performed in a way that the amplificates carry a detectable label.

4. Method according to claim 1, further comprising the steps of hybridising the amplificates to a least one or more oligonucleotide and/or PNA probe or to an array, wherein the base sequence of the oligomers includes at least one CpG dinucleotide.

5. Method according to claim 1, characterised in that the amplification step preferentially amplifies DNA which is of particularly interest in prostate cells, based on the specific genomic methylation status of prostate cells, as opposed to background DNA.

6. Method according to claim 1, characterised in that the chemical treatment is carried out by means of a solution of a bisulfite, hydrogen sulfite or disulfite.

7. Method according to claim 1, characterised in that more than ten different fragments having a length of 100-2000 base pairs are amplified.

8. Method according to claim 1, characterised in that the amplification of several DNA segments is carried out in one reaction vessel.

9. Method according to claim 1, characterised in that the polymerase is a heat-resistant DNA polymerase.

10. Method according to claim 1, characterised in that the amplification is carried out by means of the polymerase chain reaction (PCR).

11. Method according to claim 3, characterised in that the labels of the amplificates are fluorescence labels, radionuclides, and/or are detachable molecule fragments having a typical mass which are detected in a mass spectrometer.

12. Method according to claim 1, characterised in that the amplificates or fragments of the amplificates are detected in the mass spectrometer.

13. Method according to claim 3, characterised in that the produced fragments have a single positive or negative net charge for better detectability in the mass spectrometer.

14. Method according to claim 2 and 3, characterised in that detection is carried out and visualised by means of matrix assisted laser desorption/ionization mass spectrometry (MALDI) or using electron spray mass spectrometry (ESI).

15. Method according to claim 1, characterised in that the genomic DNA is obtained from cells or cellular components which contain DNA, sources of DNA comprising, for example, cell lines, histological slides, biopsies, blood, lymphatic fluid, tissue embedded in paraffin; for example, prostate or lymphatic tissue and all possible combinations thereof.

16. An oligomer, in particular an oligonucleotide or peptide nucleic acid (PNA)-oligomer, said oligomer comprising in each case at least one base sequence having a length of at least 9 nucleotides which hybridises to or is identical to a chemically pretreated genomic DNA according to one of the Seq ID Nos 1 to 112.

17. The oligomer as recited in claim 16; wherein the base sequence includes at least one CpG dinucleotide.

18. The oligomer as recited in claim 17; characterised in that the cytosine of the CpG dinucleotide is located approximately in the middle third of the oligomer.

19. A set of oligomers, comprising at least two oligomers according to claim 16.

20. A set of oligomers as recited in claim 19, comprising oligomers for detecting the methylation state of all CpG dinucleotides within one of the sequences according to Seq. ID Nos. 1 through 112, and sequences complementary thereto.

21. A set of at least two oligonucleotides as recited in claim 19, which can be used as primer oligonucleotides for the amplification of DNA sequences of one of Seq. ID 1 through Seq. ID 112 and sequences complementary thereto and segments thereof.

22. A set of oligonucleotides as recited in claim 21, characterised in that at least one oligonucleotide is bound to a solid phase.

23. Use of a set of oligomer probes comprising at least ten of the oligomers according to claim 19 for detecting the cytosine methylation state and/or single nucleotide polymorphisms (SNPs) in a chemically pretreated genomic DNA according to Seq. ID No.1 to Seq. ID No.112 and sequences complementary thereto.

24. A method for manufacturing an arrangement of different oligomers (array) fixed to a carrier material for analysing diseases associated with the methylation state of the CpG dinucleotides of one of the Seq. ID 1 through Seq. ID 112 and sequences complementary thereto, wherein at least one oligomer according to claim 16 is coupled to a solid phase.

25. An arrangement of different oligomers (array) obtainable according to claim 24.

26. An array of different oligonucleotide- and/or PNA-oligomer sequences as recited in claim 25, characterised in that these are arranged on a plane solid phase in the form of a rectangular or hexagonal lattice.

27. The array as in claim 25, characterised in that the solid phase surface is composed of silicon, glass, polystyrene, aluminium, steel, iron, copper, nickel, silver, or gold.

28. A nucleic acid comprising a sequence at least 18 bases in length of a segment of the chemically pretreated genomic DNA according to one of the sequences taken from the group of Seq. ID No.1 to Seq. ID No.112 and sequences complementary thereto.

29. A kit comprising a bisulfite (=disulfite, hydrogen sulfite) reagent as well as oligonucleotides and/or PNA-oligomers according to claim 16.

30. The kit of claim 29, wherein the additional standard methylation assay reagents are standard reagents for performing a methylation assay from the group consisting of MS-SNuPE, COBRA, and combinations thereof.

31. A DNA- and/or PNA-array for analysing prostate cell proliferative disorders, comprising at least one nucleic acid according to one of the preceding claims.

32. The use of a nucleic acid according to claim 28, of an oligonucleotide or PNA-oligomer according to claim 16, of a kit according to claim 29, of an array according to claim 25, of a set of oligonucleotides according to claim 19 for the classification, differentiation and/or diagnosis of prostate lesions or the predisposition to prostate carcinoma and/or for the therapy of prostate carcinoma.

The application's sequence listing, which the Patent Office published only in electronic form, follows.

SEQUENCE LISTING (116 sequences)

SEQ ID NO: 1 - DNA, 3953 bp, Artificial Sequence
  chemically treated genomic DNA (Homo sapiens)
agtaggagggtaggagagaattttgtatagttggttacggtgttttatttaagggtttaatttggggttttattataaaagttgtagtaaaattgttaaaaataggaattattgggggtgggggttttgttttttttgtttagttattattttttttttttaatttttattttggtttatattacgtgtttttagaagaaacgttttgagtaggggttggtatgagattgtttttttttttaggatttatttttttttatgattaggttggtgattttttttttagggtgttagtgttatttattgagtagatgtttggtaggtgtttgttatgtgttagatttagtaggggatagagttttttcgatatagatggattagtatgtttggatataaattgtgaaaggagttgttaatttttttgtgtaaaatttatttttgcggttatcgttaatatttttatatatgttagggtatttagggttaggatttggtaattttgtttaggagtagtcgttttggagatttttaagacgagggaaagaaatgggtggaaataggggtttatattgtgggtttcgtagttattaaatagtttaattcgtggttattgagtgttttgaataatgtttggttggattttgagtttgagtgtgttattaatttagtttgttattgtcgttgttgttgttatgtatttttttattagttttgtttagaaagattttttttttttttaaaatattagtaaagggggtttagattagtttaagttaaatattttgtaataaaatggagtagttattttggtgaataagtatatttagaaaaggaaattgtttgtttggtaagatgttgtttaatagtattttttattttgatgtttcgtagtttttgagttaggaaattgagaagtttttgattagattgtaaaggttgtaggtttcgtaagggtgtaaggttatttttaaagaattagaagttaggtttttcgatttttatttttgttagcgttaaatagtaatcgttgaaggatgtagggtagttgtgagttgtagtttttttataggtaaaaattataagggtaaaatttggtttttagttttatagggatattttaagttgtgaaagtgttttggttataaagaattgcgtaaatgttaaatattaggtttagttataataattattttagtaataaattaaagagaagggtgaaatattggtaagtattttggagtttaattagtaagtttttgagatttttttatgtgttgattgggataaattttattttttaaaagaaaagacgtttttttggttcgagatatttgtgagttgttttagtaggggattagttatttttttattttttaaagttatagatagttgggatggttaagtaggtagtttaggttgatggtttattaaggttatttttttgtttatatagttttatagatatttggggttattttagttttagaaaagatgttttatattttagtaattgtaagttaaggataagtagagagatgtgggattgttgtttttatgtttgttgtagaagttgaggttttagatttgataaagtaagtgtagtgggaataagggaatatattattagaaattgggattttagaaaatagaatagttattgtttattaagtgttaggtatttttttaatagttttgtatatatgtttaaagtttatgtttaaaacgatataaatttattattttatagttatggaggatagaagtttaaaatgggttatattgggttaaaattatggtggtagtagagttgtgtttttggaggttgtagggaaaaatattttgttttttttagtttttagggaagggttgtttatgttttttagtttatggtttttttttagtagttacgagtttgatttttattgttatttttatatttttttttttgattttgaggttattgttttttttttgtataattaaggatttttgtgatgataatgggtttatttggagaatttaggttaattattttatttttaggtttttaattatattagtaaaatttttttttgttatggaaggtagtaaagttataggttttagggatgaggttgtggatatttttggggagcgttattttgtttgttatatagtaatttttgttataatttagggcgatggtatattttattattatttttaattagaaattgatgtgtggggaggtgatgtattataatttatttagggttaggtagttggatttgaatttgtttgatttttagatttgaggttttttggttttagaattttttttgaagtgaaaggtatgaggtcgattattttttgatttggtaaatagagatgttagtttggtttttagtgttagggagttttttggagtgatggtatagggtatatttttgttttgtattttaagtttagagattgggttttaggtttagttttttttttaattttttgagagatgatagtttttgggtaaagtttttttgtgttttttagtttttttatttgtgagatggtggtatggggagaggttggagtgatgttatagttttttttagtttgtattataggttttaggatttaggttttattagtaatttgttgggggaggtttgggttttttaggagaaatttgataagatggtgttgtaaatattaacggatatatagtattttatatttataggttgttttaggggtttttaataattttgattatttttgttttattttgtagatagaaaatcgaggtttagagagattatataatttgtttacgatttttttttagtaagatggaggttaagtgaaatgagaaagtaggttttttgttattttttttgtttagaggttttttttttatattagggttttttaagggttgagatttagttatatttgtgcgtgattaaatataagtgtgaataatgtaaagggagacgtttttaatttaaggggttttaattttgtaatgtaattttgagattatgtttttttttgttaaagttttttttttttgaagtgatggttattgtagatggtgagggttttttggaggcggataatatttttatatgataaaattaaaagttggtagtttcgaattgatttttggagtgttttgaaatgtaagaggttttcgaaattttagtttgggagttacggagggtttttttttttttttaggtttattagtttgggaggtttggagagaggtttggaggatttgttggggattaaagaagagtattggtgggaggatagggcgggggaagggggaggggagtgaagtagtttttttggaatgttggtggtgggggaggtagtttttttggtggaggagttttagcgttttttttttttttttttttgttaatataatggataatggtaattgtttatatatttttatggaggggaaggggatgagtgtagggaatttcgattttattcgggagatttgtaagtttgtagatatttttttttcgtttttattgaatttttgatttttgttttgtagttttcgtagtttgttgtttgtttattttatttgtttagttttagggatagagttgatttttgaatttttaagttttatattgttaggattagtgagtagtaatagggtcggggttgggtttattagttttttagtttagattttggttgtagatataaataggttttgtaagagttggttgtttagagattgcgagaaggaggtgcgttttgttgtttgtttcggttattttggttttttagtttaaggtttaggttttgttttaggtcgggtttttgggtatttgaggttttttttcgttttgtgtttttttttttatttggttgtaatgagtgggggagtacggggtttttgtatgttgaaggtattttatttagttaggtttttttttttttttagg

SEQ ID NO: 2 - DNA, 3953 bp, Artificial Sequence
  chemically treated genomic DNA (Homo sapiens)
tttggaggagaagaagggtttggttgagtggggtgtttttagtatgtagaagtttcgtgtttttttatttattgtagttaggtgaggagaagggtatagagcgggagaagattttaggtatttagaggttcggtttggggtaaggtttgaattttgagttggggagttagagtgatcggggtaggtagtaggacgtatttttttttcgtagtttttaagtagttagtttttgtagggtttatttatgtttgtagttagggtttgggttgggaggttgataagtttagtttcggttttgttgttgtttattggttttggtaatgtggaatttaagagtttaaggattagttttgtttttggggttgggtaaatagagtgggtaaatagtaagttgcgggggttgtagggtaggggttaagggtttagtgggggcgggaggggagtgtttgtaggtttgtaggtttttcgggtggggtcggggttttttgtatttattttttttttttttatgggagtgtgtgggtagttgttattgtttattgtgttggtagaggaggggaggggagggacgttgggatttttttattaaggagattgttttttttattattagtattttagggagattattttattttttttttttttttttcgttttgtttttttattagtgtttttttttagtttttagtaggttttttaggtttttttttaagttttttaaattggtaaatttggggagaggggagagtttttcgtggtttttagattgaggtttcggagattttttgtattttaaaatattttagagattaattcggagttgttaatttttaattttgttatgtaaagatattgttcgtttttaaaaaatttttattatttatagtgattattattttaaaaaggaaaggttttaataaaaaagggtataattttagaattatattatagaattgaagttttttagattgaagacgtttttttttgtattgtttatatttatatttgattacgtataggtgtgattggattttagtttttgggaagttttggtgtggggagaagatttttgggtaaaggaagtggtaggagatttgtttttttattttatttggtttttattttgttggaggaagatcgtgggtaagttatataatttttttgagtttcggttttttatttgtaaaatggggtaagaatggttagggttgttggaggtttttgagatagtttgtgaatgtaaagtgttgtgtgttcgttggtgtttgtagtattattttgttaggttttttttggaaggtttagattttttttagtaggttattgataggatttgagttttagagtttgtgatgtaggttgagaggaattgtgatattattttagtttttttttatgttattattttatagatgaagagattgaagagtatagagggattttgtttagaggttgttattttttagggagttagaagaaaggttggatttagaatttagtttttggatttgggatgtagggtagaaatgtattttgtattattattttaggaaattttttaatattagaaattaggttgatatttttgtttattagattagggagtggtcggttttatgttttttattttagagaagattttggagttagaaaattttaaatttaagggttaggtaggtttaaatttagttgtttgattttggatgagttatgatatattatttttttatatattagtttttgattgaagataatgatagaatatgttatcgttttgagttatggtaggggttattgtgtggtaagtagaataacgttttttaaagatgtttatagttttatttttggaatttgtggttttgttattttttatggtaaaaaaagattttgttagtgtgattaaggatttggagatggggtggttggtttggattttttaggtgggtttattgttattataggggtttttaattatataagagggaggtagtggttttagagttagagaaagagatgtgaggatggtagtggagattagattcgtgattgttggaagggggttatgagttgagggatatgagtaatttttttttagaagttggagaaggtaaagtatttttttttgtagtttttaggagtatagttttgttgttattatgattttagtttagtatgatttattttggatttttgttttttataattgtaagataataaatttgtatcgttttaagtatgaattttgaatatatatgtaaaattgttagaaaggtatttagtatttagtaaatagtaattattttgttttttagaattttagtttttggtaatgtatttttttatttttattatatttgttttattagatttgagattttagtttttgtagtaggtatgaaggtagtagttttatatttttttgtttgtttttgatttgtagttgttgagatatggaatattttttttaggattgaagtggttttagatgtttatgggattgtgtagatagggaggtggttttggtgagttattagtttgggttgtttatttgattattttagttgtttgtagttttagaaagtgggaaggtggttggttttttgttgggatagtttataggtgtttcgggttaagagagcgtttttttttttggggggtagagtttgttttagttagtatatgggggaattttagaagtttattggttggattttaagatatttgttagtgttttatttttttttttggtttgttattaaaatgattgttatggttaaatttagtatttaatatttgcgtagttttttgtggttaaagtatttttataatttagaatatttttataaggttggaggttagattttatttttgtgatttttgtttgtgggaaaattgtagtttatagttgttttgtattttttagcggttattatttagcgttggtaggggtgggaatcgggaggtttggtttttagttttttgagggtggttttgtatttttgcggagtttgtagtttttgtagtttgattagggattttttagttttttggtttagggattgcgaggtattaggatagggggtgttgttgaatagtattttattaagtaggtagtttttttttttaaatatatttatttattagggtggttattttattttattgtaaggtatttggtttaaattagtttaagttttttttattaatattttggaaaggaaggaggtttttttggatagagttgatggaaaaatatataataataataacgataataataaattgggttgatgatatatttagatttagggtttagttaggtattgtttaaggtatttagtggttacgggttggattgtttggtggttgcggggtttatagtgtaggtttttgtttttatttatttttttttttcgttttgggagtttttagagcgattgtttttgaatagggttattaagttttggttttggatgttttgatatgtgtaggagtgttggcggtgatcgtaagagtggattttgtatagaaagattagtaattttttttataatttatgtttaaatatattggtttatttgtatcgggaggattttgttttttgttaggtttggtatataatagatatttgttaaatatttgtttagtgaatggtattggtattttagagggagggttattagtttggttatagggaggagtgggttttgggaggggaggtagttttatattagtttttgtttagaacgttttttttgggagtacgtggtatgagttagaatgagagttagggaggggaggtggtgattgagtaggggagataggatttttatttttagtagtttttatttttggtaattttgttgtagtttttgtgatagagttttaagttagatttttgggtggggtatcgtagttagttatgtaagatttttttttgtttttttgtt

SEQ ID NO: 3 - DNA, 7432 bp, Artificial Sequence
  chemically treated genomic DNA (Homo sapiens)
atttgaagttagagttatttagaggagaaagagttggaattgagaatttaaggaatgtttggaagtgatcgggttcgagtttatttaggaagaaatagaggttggagatatgagattgtgttgttatttttttttattaatttttgggttttattgaggttttattataagtttggttttgtagtttagtgattaggagaaattagatataagataataataatagtaatgattttttttttttttttgagacggagttttgttttttcgtttaggttggattgtagtggcgcgatttcggtttaatgtaagttttattttttaggtttacgttatttttttgttttagtttttcgagtagttaggattataggcgtttgttattacgtttggttaattttttatatttttagtagagatggggttttatcgtgttagttaagatggttttaattttttgatttcgtgattcgtttgtttcggttttttaaagtgttggggttataggtatgagttatcgcgtttggttaatagtaatgatttttgagtatttatattgttagtttttacggtaagagttttttttattttttgttttgttttgttttaagatagagttttgttttgttatttaggttggagtgtagtggtgtgatcgcggtttattgtagtttttatttttcgggtttaagttatttttttgttttagttttttaagtagttgggattataggtacgtattattatttttggttaatttttgtatttttagtagggatagggttttttattatgttggttaggttggttttaaatttttggttttatatgatttgtttatttcggttttttaaagtgttgggattataggcgtgagttattgcgtttttttttgtatttgtttaagtaatatattgaaatatgtattgtgttttttattttatggaggaggaaattgaggttagtaaatgaggttgttatgggaggtggagataggatttgaatttgttttagtgtaggaggtttaagagtttttgtttttttttagggtattgtgtgggagggtgagaaggagggaggtttatagaggtatgatttttgattgttattgttatttgggttttgttttttgaagtttttgttaagcggggaggtggtcgggggagggttttgttttgtgtagttttttttttttcggttcgtagagttgagtatagagggatagaggtacggaatttttagaaatgtttttttttagaaataggttttaggttttgtttgttttgtgtttttgcgtgttggttttggtttgtattgggggtgagaagaagtgggtggagggatgtggggtttatatttggtgggtgtgagtgtggttgtgtgttttgtggttttgtagttacgtgagatatgagtacggagtgtgtgcgttttatggcgtgcgtatgtatgtgcgtgtcggggagtgtgtgtgtcggtggttgagagtgaagtgtgaatgttatattggtataaattgggattatttgtgtgtgtgtacgtgcgtgcgtggaagtgggagtatgtagtcgtggtaaaaaagtgtatgtttgtgtgtatatgtgtatttgtgtgtatttgtttttttgtggggtatgtgtgtgtaaaatatttgagtgtgtggatatgtgtgagggggtgagtgtgtgttggtgtgtacgtttgtgttttgtatatgtatttttttttttttttttgagacggagttttattttgttatttaggttggagtgtagtggtagtagtggtgcgattttggtttattgtattattcgtttattcgttttaagggatttttttgttttagtttttagagtatttgggattatagatatacgttattatgtttggttattttttttttttgagacggagtttcgttttgttatttaggttggagtgtagtggcgtgattttggtttattgtaacgttcgtttttcgggtttacgttatttttttgttttagtttttcgagtagttgggattataggagtttattattacgtttggttaattttttgtatttttattagagacggggtttcgtcgtgttagttaggatggtttttatattttgatttcgtgattcgtttgtttcggttttttaaagtgttaggattataggcgtgagttattgcgtttggttaatgtttggttaatttttttatatttttggtagagatagggttttgttatgttgtttaggttggttttgaaattttgattttaggtgattcgttcgttttggttttttaaagtgttgggattataggtatgagttattacgttcggttatgtattttatgttaaaatgggattatattttagattagtattatttagtagaaatttaaatttttaatatagggttaggtacggtggtttatgtttgtaattttagtattttcggaggtcgaggcgggtggatcgtaaggttaggagatttgagattattttggttaatagatgggtaaaaatttatttttattaaaaatataaaaaattagttatgtatggtggtatgcgtttgtagttttagttattcgggaggttgaggtcggagaattatttgaattcgggaggtagaggttgtagtgagtcgagatcgcgttattgtattttaatttgggtgatagagcgagatttcgtttgaaaaaaaaaaaaaatttaatacgtatgtagataatgtgtaaggtattattttatgtgtatcgtatgtagtaatttttaatttttacgataattttgaggtagatattattatttcgttttataaaaggagaaatagttttggggagataggataagttatcggttaaggtatatagttagttatatgtggttttcgcgtgacggttggtttttgtaggcgaggttttgtttagatgcgtgggtagaaggtttggttcggaaagaggaattgatagtaaggttaagttaatgtttgtttttgggggtagaaagttattttttgttttttttttattgtttatagaggtagtttagatagggtgggggttataggagaacgaagggagaagggggtagtttttgggtagtaaaattaggtggtgaagggaggtattagaggatggtaattagagaggttattagaggggaattataggtagatagggtgataggagggattattgatataaggtgaagagatggtttagtcggacggggtggtttatatttgtaattttagtattttgggagttcgaggtgggtggattatttgaggttaggagttcgaggttttaatatggtaaaattttattttttttaaaaatataaaaattagtcgggtatgatggtagatgtttgtaatttttgttattcgggaggttgaggtaggaaaattgtttgaatttaggaggtggaggttgtaatgagacgagattatgatattgtattttattttgggtaatagagtaagagattgattttgttttataaaaaaaaagaaaaaagaaaaaaaaaaagagatggttgatggttaaagaggggttagcggttaggggatatataagggtaaaggtaggaggtaagaggattggtagggggttgtttttgggttatcgggagcgatataggatgagtatggagggaaagggagaaggggattttagggttttagtttatttaagttgttttttggttttatttagtatgttagttagaggtttaggaaggaattttgagttttttattaaagttaaagatgagtcgttggagtttggtgaggggtaggatgaaggagttgttggagatagtggtgaataggattagagacgggtggtaatggttttggtgagggtgtgttgggttgggtggtgggaggggatttttgggtttgagggaggaggggttggggtttggatttttgagttttagggaggaggaaagggtgggagtggggttgtgatttttaggtttgggaggagtggagggttagagttgagagtaggaatttttaggttatagagaggagcggataaatggggtagagaatatttggggagagttggggtttttattgtgatgtttttttttttgtaggagttcgagtatttttcggggttttatgtagatttattatgacgattatttgagggatttgggttcgtttattaaggtttggtttttcgaatttaaagatagttttttgaagaagatttatagtttgtgttttaggtttgtttgtggggataaggattagggttaaaatgtttataaaagttaggtgtggttgtggcgggtgtttgtagttttagttatttaggaggttgaggtaggatgatggtttgagtttaggagttcgagattagtttgggtaatatagcgagattttttgggggtaaaataaaaagaaaaaaaaaagtttatatttttttaataaataaagttttatttgtgtttttgtttggatttttttttagtgtggttagaaaaaaatttattttattgttttttaggaattaatgagtagaagaggtgatatttgatggggaaggaagagtagggaggtcgggaagggtattaaggaataatattttattgtgggtttgcggagaatgggggattttaaggcgtgttagttttaggagggtgagggtaggagcgtgggtggagttagtaggtttttatgatggtttttattgagagtttcgtttttgttttttataagttttgattttatttttagtgggtatttagtatttttaatttttttatagtttttaatttagtttttgtcggaggcgaatttttagagtgagggttttttgttatttgagagaaggttttttgtgacgtgattttgggggacgttattgttttttttgtttttatttatttttttcgtagttttgttggttaggattttggtttagataaaggatgggggttgtggttgtggagcggaagtgggttttaattattataaattttttttgtgttcgttcggagttggtgaggatagtttgttagagtttggtaagaaagggatttagggtgcggggataggggggcgttagtagggagagggtaaagatcgataaagtaggaattttaagaggtataatattagaagttcgtgttggaattatgattgtgtgtgtgtgtgtgtgtgtgtgtgtgtgtgtgtgtgtgtgtgagagagagagagagggagatggagtttcgttatgtagtttaggttagatttaaatttttgggtttaagtaatttttttgttttagtttttttagtagttgggattataggtgtattattatattttataaattatagaatttagaattgtagattatttgagtttttgtttagagttagggtggttgaggtggggaggattttttgagtttaggagtttgaggatgtagtgagttgtgattttgttatcgtgttttagtttgggtgatagagaaattttatttttaaaaaagagaaagaaaaagggataggtataatggtttatgtttgtaattttagtattttgggaggtcgaggcgggtggattatttgaggttaggagttcgatattagttttattagtatggtgaaatcgtatttatattaaaaatataaaaattggtcgggtgtggtagtatatgtttgtaattttagttattttagaggttgagataggagaattgtttgaatttaggaagcggaggttgtagtgagtttagatcgtgttattgtattttagtttgggtgatagagtaagatttagttttggcggaaaaaaagaatgaaaaaatttaaaaaattaaaaaagaattgtaggttgggcgtggtggtttatatttgtaatttaaacgttttgggaggttaaggtaaacggattatttgatgttaggagttggagattagtttggttaatatggtgaaatttcgtttttattaaaaatataaaaattagataggtatggtggtgtatgtttgtatttttagttatttaggaggttgaggtaggagaatcgttcgaattcggaagatagaggttgcggtgagttaaaattgcgttatcgtattttagtttgggcgagagaataagattttgttttggaaaaaaaaaaagaattgtagattatttgtttgtgtttttttttcggggattagattttattttttttttgtcgtatttttttattttttacgtgtggatgatgatattgtgttttgtgtatgtttttcgttattaaaagtgttttttttatagagtaggtgagaatttagtgaggagatgtagggatatgaggtttgatttagggtagagttttaaggtaatatatttgatttattgtaggtttttaatggtgtttgtagagtatttttttgtattgatttagttttagtaaagggtagaggttttgttgtgttttttgttgggtttagaattgtttaggtgtttaagaaagttttttaggttgggtttagtggtttatatttgtatttttagtattttggggaggtcgagatgggaggatcgtttgagtttaggagttttagattagtttgggtaataaaataagttttttatttttataaaagaataaaaattagtagttgggtatggtggtttatgtttgtaattttagtattttgggaggttaaggtaggtaaattatttgaggttaggagtttaagattagtttggttaatatggtgaaattttatttttattaaaaatataaaaattaggtggggtatagtggtttaagtttgtaattttagtattttgggaggttaaggtgggcggattacgaggttagaagttcgagattagtttggttagtatggtgaaattttatttttattaaaaatataaaatattagtcgggtatggtggtaggtgtttgtgattttagttttttgggaggttgaggtagaagaattgttagaattttggaggtagaggttgtagtgagtcgagaatacgttattgtattttagtttgggtgatagagcgagattttattttaaaaaatacgaaaataaaaattagtcgggtggtggcgggtgtttgtaattttagttattggggaggttgaggtaggagaattgtttgaatttgggaggtgggggttgtagtgagttaagattgtattattgtattttagtttgggtaatagagtgagattttattttaaaaaagaaaaaaataataattaaaatgttaaaattaggagtagaattatagaatgttggaaagtgaggtttaagaagggggttgtgtttaagtttatgtatgggaaatttgattgggatatcgagtttatatagagtaggattttagttttttttattagagtggggcgtgattataggaatagtcgtttttagttagtttgttatatgatatttttttaatgttttagg

SEQ ID NO: 4 - DNA, 7432 bp, Artificial Sequence
  chemically treated genomic DNA (Homo sapiens)
tttggaatattgagggggtgttatgtggtaggttgattggaggcggttgtttttgtggttacgttttattttggtgggggggattgagattttgttttgtgtgagttcggtgttttagttaagttttttatgtatggatttggatatagttttttttttgggttttattttttaatattttgtgattttatttttgattttaatattttaattattattttttttttttttgagatggaattttattttgttgtttaggttggagtgtagtggtgtaattttggtttattgtaatttttattttttaggtttaagtaatttttttgttttagtttttttagtagttgggattataggtattcgttattattcggttgatttttgttttcgtattttttgagatggagtttcgttttgttatttaggttggagtgtagtggcgtgttttcggtttattgtaatttttgtttttagggttttagtaatttttttgttttagttttttaaggagttggaattataagtatttgttattatgttcggttaatattttgtatttttagtagagatggggttttattatgttggttaggttggtttcgaatttttgatttcgtgattcgtttattttggttttttaaagtgttaggattataggtttgagttattgtgttttatttgatttttgtatttttagtagagatggggttttattatgttggttaggttggttttgaatttttaattttaagtgatttgtttgttttggttttttaaagtgttggaattataggtatgagttattatgtttagttgttaatttttatttttttgtagagatgggagatttgttttgttgtttaggttggtttggaatttttgggtttaagcgatttttttatttcggtttttttagggtgttgggagtataggtgtgagttattgagtttagtttagaaggtttttttgagtatttaaatagttttgggtttagtagggaatatagtaaagtttttgttttttgttaaggttgagttagtgtagggaggtgttttgtagatattattaaggatttatagtagattaaatgtgttattttagggttttgttttaagttagattttatgtttttgtatttttttattgagtttttatttgttttatgagagaggtatttttggtgacgaagaatatgtatagggtataatattattatttatacgtaggagatgaggaagtacggtagaaagagggtgagatttgattttcggagaaagaatataagtaaatggtttataattttttttttttttttaagataaggttttgttttttcgtttaggttggagtgcgatggcgtaattttggtttatcgtaatttttgtttttcgggttcgagcgatttttttgttttagttttttgagtaattggaaatataagtatgtattattatgtttgtttaatttttgtatttttagtagagacggggttttattatgttggttaggttggtttttaatttttgatattaagtgattcgtttgttttggttttttaaagcgtttggattataagtgtaagttattacgtttagtttatagtttttttttagttttttaaatttttttatttttttttttcgttaagattgagttttgttttgttatttaggttagagtatagtggtacgatttgggtttattgtaattttcgttttttgggtttaagtaatttttttgttttagtttttggaatagttgggattataggtatatgttattatattcggttaatttttgtatttttagtatagatgcggttttattatgttggtaaggttggtgtcgaatttttgattttaagtgatttattcgtttcggttttttagagtgttgggattataggtatgagttattgtatttattttttttttttttttttttttagaaatggggtttttttgttatttaggttggaatacggtggtaagattatagtttattgtatttttaaatttttgggtttaagggattttttttattttagttattttaattttaagtagaagtttaaatagtttatagttttaaattttgtgatttgtggagtgtggtggtgtatttgtagttttagttattggggaggttgaggtaggaggattgtttgagtttaggagtttgagtttagtttgggttatatagcgagattttattttttttttttttttttttatatatatatatatatatatatatatatatatatatatatatagttatggttttaatacgggtttttaatattgtgttttttaaaatttttgttttatcgatttttgttttttttttgttgacgtttttttgttttcgtattttgagttttttttttattagattttggtaggttgtttttattagtttcggacgggtatagagaggatttatagtggttgagatttattttcgttttatagttataatttttattttttgtttaggttaaagttttggttaatagaattgcggagggggtgggtggggatagaaagggtaatgacgttttttaaggttacgttatagggaatttttttttaagtgatagggaatttttattttgagaattcgttttcgatagaggttgggttgggggttgtggaggggttggaggtgttgggtgtttattgggaatggagttagagtttgtaggagataagggcgaagtttttagtgagggttattatggggatttgttgattttatttacgtttttgtttttatttttttgaaattgatacgttttgaagttttttatttttcgtaagtttataatagggtgttattttttgatatttttttcgatttttttatttttttttttttattaggtgttattttttttatttattgatttttgggaggtagtggggtgggtttttttttggttatattggggaaggatttagatagggatataggtgagattttatttattggagaagtatgaatttttttttttttttttgttttatttttaagagatttcgttgtgttgtttaggttggtttcgaatttttgggtttaagttattattttattttagttttttgagtagttgggattataggtattcgttataattatatttggtttttatgaatattttaattttggtttttgtttttatagataagtttggggtataggttgtgggttttttttaagaggttgtttttggattcgaggaattaggttttggtgagcggatttaggttttttaggtggtcgttatagtaggtttgtatgaagtttcggaaggtgttcgggtttttataggagagaggatattatagtggaggttttagttttttttaggtgttttttgttttatttattcgtttttttttgtgatttaggagtttttgtttttagttttaattttttattttttttagatttaggggttatagttttatttttattttttttttttttttgagatttaggggtttaggttttagtttttttttttttagatttaggagtttttttttattatttagtttagtatatttttattagaattattgttattcgtttttggttttgtttattattgtttttagtagtttttttattttgttttttattaggttttagcgatttatttttagttttggtggggggtttagggtttttttttgggtttttggttggtatgttaggtggaattagagggtaatttgggtaggttgggattttagaatttttttttttttttttttttatgtttattttgtgtcgttttcggtggtttaggggtagttttttgttagtttttttgttttttgtttttatttttatgtgttttttgatcgttaatttttttttaattattagttattttttttttttttttttttttttttttttttatgagatagagttagttttttgttttgttgtttagggtggagtgtagtgttatgatttcgttttattgtaatttttattttttggatttaggtaatttttttgttttagtttttcgagtagtagggattataggtatttgttattatgttcggttaatttttgtatttttagaagagatggggttttgttatgttggggtttcgaatttttgattttaagtgatttatttatttcgggtttttaaaatgttgggattatagatgtgagttatttcgttcggttgggttatttttttattttgtgttagtagttttttttgttattttgtttgtttgtggtttttttttaatggtttttttaattgttattttttgatgtttttttttattatttgattttgttgtttaggaattattttttttttttttcgtttttttgtgatttttattttgtttgagttatttttgtggatagtggagggagagtaggaggtgattttttgtttttaggggtagatattggtttagttttgttgttagttttttttttcgggttagattttttatttacgtatttggataaagtttcgtttatagagattagtcgttacgcgggggttatatgtagttagttgtgtgttttggtcggtgatttattttgtttttttaggattgtttttttttttgtagaacggggtaataatatttattttagggttatcgtgagaattaagagttattatatacgatgtatatggaatggtgttttgtatattgtttatatacgtgttaaatttttttttttttttagacggagtttcgttttgttatttaggttggaatgtagtggcgcgatttcggtttattgtaatttttgtttttcgggtttaagtgatttttcggttttagtttttcgagtagttgggattataggcgtatgttattatgtatggttaattttttgtatttttagtagagatgggtttttatttatttgttagttaggatgattttaaattttttgattttgcgatttattcgtttcggttttcgaaagtgttgggattataggtatgagttatcgtgtttggttttgtattaaaaatttaaatttttattggataatgttgatttagaatatgattttattttaatataaagtatatggtcgggcgtggtggtttatgtttgtaattttagtattttgggaggttaaggcgggcggattatttgaggttaggattttaagattagtttgggtaatatggtaaaattttgtttttattaaaaatataaaaaaattagttaggtattggttaggcgtagtggtttacgtttataattttagtattttggaaggtcgaggtaggcggattacgaggttaggatatggagattattttggttaatacggcgaaatttcgtttttagtaaaaatataaaaaattagttaggcgtggtggtgggtttttgtagttttagttattcgggaggttgaggtaggagaatggcgtgaattcgggaggcggacgttgtagtgagttaagattacgttattgtattttagtttgggtaatagagcgagatttcgttttaaaaaaaaaaaatagttaggtatggtggcgtgtgtttgtagttttaaatattttgaagattgaggtaggagaattttttgaaacgggtaggcggatgatgtagtgagttaagatcgtattattgttattattgtattttagtttgggtgatagagtgagatttcgttttaaaaaaaaaaaaaaaaatgtatatgtaaaatatagacgtatatattagtatatatttatttttttatatatgtttatatatttaaatattttgtatatatatattttatagagagataggtgtatataaatatatatatgtatatagatatgtatttttttattacgattgtatatttttatttttacgtacgtacgtgtatatatatagatgattttagtttgtattaatgtgatatttatattttatttttagttatcgatatatatatttttcgatacgtatatgtatacgtacgttatgaaacgtatatatttcgtatttatgttttacgtggttatagagttataggatatatagttatatttatatttattaggtgtgggttttatatttttttatttatttttttttatttttaatgtaggttaggattagtacgtagaggtatagggtaggtagggtttggagtttgtttttgaggagggatatttttgggggtttcgtgtttttgtttttttgtgtttaattttgcgggtcgggggaggggaggttgtatagagtagggttttttttcggttattttttcgtttggtagagattttagagagtagggtttaggtgatagtggtaattagaggttatgtttttgtgggttttttttttttttatttttttatatagtgttttgagagaagatagaggtttttgagttttttgtattgaggtaggtttaaattttgtttttattttttatgatagttttatttgttggttttagtttttttttttataaagtgggaggtatagtatatattttagtatattatttgaataaatataaagaaaggcgtagtggtttacgtttgtaattttagtattttgggaggtcgaggtgggtagattatatgaggttaggagtttgagattaatttggttaatatggtgaaaaattttgtttttattaaaaatataaaaattagttagaagtagtgatgcgtgtttgtaattttagttatttgggaggttgaggtaggagaatggtttgaattcgggaagtgaaggttgtagtgagtcgcgattatattattgtattttagtttgggtgatagagtaagattttgttttgaaataaaataaaataaaaaatgaagaaagtttttatcgtggagattggtaatataggtgtttaaagattattgttgttggttaggcgcggtggtttatgtttgtaattttaatattttgggaggtcgaggtaggcggattacgaggttaggagattgagattattttggttaatacggtgaaattttatttttattaaaaatatgaaaaattagttaggcgtggtggtaggcgtttgtagttttagttattcgggaggttgaggtaggagaatggcgtgaatttgggaggtggagtttgtattgagtcgagatcgcgttattgtagtttagtttgggcgaaagagtaagatttcgttttagaaaaaaaaaaaagattattgttgttattattattttgtgtttaattttttttagttattgggttgtagggttaggtttgtggtagggttttaatagggtttaagggttgatgagaggaaatagtaatatagttttatgtttttagtttttgtttttttttaggtgggttcgagttcgattatttttaagtattttttgagtttttaattttaatttttttttttttgggtgattttggttttagat

SEQ ID NO: 5 - DNA, 9884 bp, Artificial Sequence
  chemically treated genomic DNA (Homo sapiens)
tcgtttaggttggagtgtagagtgatatgattttggtttattgcgatttttaattttcgtttttaggtttaagtaatttttttgttttattttttttagtagttgggattataggtttgtgttagtatgtagggataatttttttatttttagtagaacggggggttttattacgttgattaggttggttttaaatttttgattttaagtgatttgtttgtttcggttttttaaagagttaggattataggtgtgagttaatatatttagtttaaaatgattttttttttaaaggaaatttattagtaagttaagtttatttattatttattttattttatttttagagatagggttttgttttttcgtttaagttggagtatagtggtgattatagtttattgtaattttgaatttttgggtttaagtaattttttcgttttagtttttttagtagttgggattataggcgtgtattattatatttagttaattttttgtattttttgtagaaagagggttttattatgttgtttaggttgtttttgaatttttggttttaagtgatgtttttatttgggttttttaaagtgttgggattataagtatgaggtattatatttagtttgttttgtttattttttttgttttaaatatatttttgttttggttggatgcggtgttttatatttatatttttagtattttgggaggtcgaggtaggtggattatttgaggttcggagtttaagattagtttgattaatatggtaaaattttatttttattaaaaatataaaaattagttaggtatggtggtacgtgtttgtaattttagttatttgggaggttgaggtaagagaattatttgaattttggaggtagagtttgtagtgagttgagattgagatattgttttttagtttgggcgatagattgagaatttattataaaaaataaaaaaaaataaaaattaaatatatttttgttttgtaattaaattttagataaattggtgtagttttttagtatggggtaaaaaaagttatttttatgttttttgtttatttttattattataaattttataaaatatttttgtaatttttttttttttttgagaggagttttgtgttgttgtttaggttggagtgtagttgagtaatttcggtttattgtaagtttcgtttttcgggtttacgttatttttttgttttagtttttcgagtagttgggattatacggggttcgttattatattcggttaattttttgtatttttagtagagatagtgttttattatgttagttaggatggtttcgattttttgatttcgtgattcgtttattttagttttttaacgtgttgggattataggtatgagttattatgttcggttttttttttttttttagatagaattttattgtgttgtttaagttggagtgtagtggttattgtaatttttattttttaggtttaagtgattttcgtgttttagttttttaaatagttgggattataggtatgtgttattatgtttagttaaagatggggtagggggtgtagggatttcgatatgttggttagatttattttgaatttttgattttaagtgattaatttgttttagttttttaaagtgttgggattataggtgtgagttattatgtcggttaattttgttgttattgttgttgttgttttgagatagttttatttttgtcgcgtatattgaagtgtagaggcgtaattttggtttattgtaatttttatttggtttattgtaatttttattttttggatttaagcgattttttttttttagttttttgagtagttggggttataggtgtgtattattatttttagttaatttttgattttttagtagagacggggttttgttatgttggttaggttggttttgaatttttgattttaggcgatttgtttgttttggttttttaatgtgttaggattatatgcgtgagttattatgttcggttttgttgtttttagaaacgatatttttttttgttagtttgtgaaagttgattgggttatttttgttatttttaattaaaatagtgttaagaggtaaagggaaaaaaaagtatttagggtatataatattgttttaaaaatgtaattatttgtaagtttggttgttgaaattgttcgttataatttaaattagtttttttgtttgtttgttttgagatggagttttattttgtcgtttaggttggaatgtaatggtatgattttggtttattgtaatttttgtttttaggtttatgtgatttttttgttttagttttttaagtagttgggattataggtattcgttaatatatttagttaatttttgtatttttagtagagacggggttttattatgttggttaggttggttttgaatttttgattttaggtgatttattcgtttcggttttttaaagcgttgggattataggcgtgagttatcgtgttcggttgatttaaattagttttatttaattagttgttaaaaataatttgtagtgattttaaggatcgttttatttagttgttattatttgttaattaaaatttgttagttttttaaaattttattagtgataatgaatttttttaaagaataatatataatagttttttttttttgttgtttgttttgatatagggttttgttttgttgtttaggttggagtgtttcggtgtgattatagtttattgtatttttaaatttttgggtttaagtgaattttttattttggttttttaacgtgttgggattataggtatgagttattgtttttggttatattttttttttataaaaataaaatttttaattatttgtttgtttttttgacgtattaaagattattttgtttgtgtgtatgttttgaatggtaattattgttttttaaatgttttaaatttatagatttgtttttgtattttattttatttggatagttttttttttttttttttttttttttttttttttttttttttttttttttttagatggagttttatttttattgtttaggttggaggatagtggtgtaatttggggtttattgtaatttttgtttttcgggttaaagtaatttttttgttttagtttttttagtagttgggattataggtgttcgtttttatgtcgggttaatttttgtatttttagtagagatggggttttgttatgttggttaagttggtttcgaatttttgattttaggtgatttattcgttttagttttttaaagtgttgggattataggcgtgagttattgcgtttggtttggatagtttttttgtatttttgatttttaggagaattgttgttttatttttttatggtttattttgaaaagagtaggatattagagaaaaggatggttaattacgtgtttataagttatgttttaggagatgatttttgtagttcggatatttatttgttttattaaaatttaggttttaggtgtaagttaggatttgggggatggaattgaaaatgtttttttaaacggtgaaaagcgggtttagcgtagaggttgaggaggaaggattatttgaagttaggagttcgagattagtttgggtaatatagagagatttttttttacgttttgtttattatcgtcgtttttataaaaaaattagttaggtatggtggtgggattataggggtataggttgaggttagaggattgttttagtttaggagttttaggttgtaatgaatggtgataaatttattgtatttttttttgggtaatagagtgagattttgttttaaataaaataaaataaataaataaaaaaaaaagaaaagtgaaggtaacgttaataagtgtttattatgatataataatattagtattatatatatatattaattttgtatatattattaaaattttagtatggtaattttgtggagaaaaaaaaaaagtttatttaggtaagtatagaaagtgtttttttattatttttttttgattttaaatgaagaagtagagtttttaatagtatgaattagatgttggtagaggaaaaagcgagttttcgttttattttggtgtaaatttttgattttggataatttttagtaggattggtaatgatttttttaggtttttttgtgattgttgatatattttttttaatttaaagtttcggaatatatgtttaggacgtgtaggtttgttatataggtaaatgtgtgttatggtggtttgttgtaattattattttattatttaggtattaagtttcgtatgtattagttatttattttgatgtttttttttttcggttattaggatttttaaatagtttgttttaatttattgataggatttttttagaatgaatttaaaaaagttgggaatttttaatttgagcgtagatcggattacgtggaacggtgttggtgtttgttaaaaatttagattgtttcgaattttcgatttagagggtttgaagtggggttaagatttgtagattaacgggtttcgtgggaggttttttgttggtggttagtttcggggtttagttgtttattgttgttattcgtgttaaattacggtttaatattatcgatattattaatcgttttggtttttaagatagtcgcgattttagacgggtgaggtttttattttttagtattagatggggtttgggaattgttgtttagtagatttagttatttacgtggttattcggggtaattataaggtcgatttaaaagattaaaataaatgtataacgaatgttaggattaaagtcggaatatatttaattatttattttgaggtttaaatttaaaaatgttatataaaaaaataagtaatttgttaaaaaatgtagagtggcggcgggggcggggggagaggtggtgaacgcgaggggtagtattttcgggttaggtgggtcggttgttttgattttttttgcggttcggttattttgttttagttagttcggaggttgcggttgtagaagtatcgtttgcggagtaattgtaaagatgttgttcgtgcgcgttgttgcggtcgtggttcgcgttttttttcggcgggtcggattggtgagtatcgaaggtcggtatgatgtaggcggtcgggtggggttgtagggtggtggtgcgtcggttcgggcgttttttgtaggagggcgaggggttgtggcgaatgtcgttattttgtattcgtggttttttcggttggatagagtaggcgatataggtgtttttttgttcgttatttgcgtagaggtagaatggtatagggtagatagttaattcgatggtgtttagagatagggttttaagatttttgttttcggttgatagcggttttagaagggggattttgggtgaaggttagggtttgggcgttagtttttcgaggtttgttttgaatcggtgaggtttttttttttcgatttttagggtcgcgtttcgttgaaggttagaaaattgttgttagtttttgttgaagttagttagtggagtttgatattgtgtgaaggttagtaggtttagtattttatttttgtttggagtttagtttagaggaaaggaataaatgaaggtggtttttggaatatttacgtaggtttttttttagtgttgaatacgaaacgatcgtgaaaacgttttgtaggtgtaaagaattattttatgtggttagtattgtgataatagtgaagttggtttttaaattgttttttcggtagagtgtgtgttttgtggtatttggacgtgtttaaagaatttgtttttgagttttttatttggttttgagtaatttttagtgatggagaatttaagtaaaagagaataaggttggaaaatggttgtaaggattaatatttttcgttatttgttttttttgaaattaatatgattttagtgtaaacgtattgatattgatattttttttttgttttaaaagtaattttaatttgaaaggtgaaataaatatgttggttgttttgttgttttaataatcgttggtagtattttgggtttttgttaataaaaaagtatttttaacggtttttatttagtttttatggaaggtagaggttttagaattgatagtgattagtcgtagtattataatttgaaggagaaattgaaggaagttttaggtggttgtaggatttgttgagagagtaaaataagtttatatgttttaatttttggtttttaatttaattttagtatttatttagtttttgtttgtttggtttttttttttttttttttttttgagatggtgtttcgtttagtcgtttaggttggattgtaatggcgtgattttcgtttattgtaattatcgttttttaggattaagtgatttttttattttagtttttcgagtagttgggattataggtattcgtcgttatgttttgttattttttgtagtttttcgtagagacggggttttattatgttggttaggttggttttgaatttttgacgttaggtgattcgttcgtttcggttttttgaagtgttgggattataagtatgagtcgtcgtgttcggtcgtttgttgtcgttgttgttgttgttgtttttaagtaaaattggaattattttgagttttgttttttgtaggaagttgtttattttagaatttttgtaattttattaaaatatatttaaagttaaaataataaaaattgggtattttaaagggaaagatatttatattttgttaatagtggggggggggggttttcggggttttaggttttttttttttttttttttcggggttttaaaaaggaatttttttttaaaaaaaaaaaaaaaaaaaaaaaaagaaagaaaaagaaagaagaaaaaaagaaaagaaaaaagaaattagagtagttggtgaaagtttatttattttttgtataaataggatttagtttggttgtaagtaatagaaaattttaaaataatagtggtttagataaggaagaggtttattttttttttatttataagtttttgattggttattttagggttggtatggttgtttttggggtgaggatttatatttttgtttgtttattttagtggtgtttggtttaatgtttggtatatgatagatttttagtaatatttattgaatgattgaaaaaattattaattaatagaaggatattgaaaaatttttgatatgtagaattaggatgattttttaaagagtgggtttatttttagtgtttttaatagtatgtgcggatgttagttttattttgttagttatagttattgtttttttttttgtttatttaataagtaaaatttggtgttttatttaatttttatttgcgtttttattattagggagagtgtatatttggttatttttttgtaattttttttttataaatggttttgtttttttttttatgttttgtttgtaaatttatatgtatattttaaaatatatatttttgtatatatatacgtgtgtgtgtgtgtgtgtgtgtgtgtaatttatatgttttaatatttagtataggtatgatatagtgagaggtagtttttaggtttttaagtttttgtattggatattttcgggtttgatttttagtttggttttttttaagttaaagaatgtgtgtgttcgtgtttaaattatttagttttttttagttttgtttttttatttgtaaaatgatatatgtatatggattttgaaaatattttatatagttaagtttattgatttaaagttttgtgattttttttattatatttcgaggttttttgtggtttaagttttatttaatatgtgttttatgattgggcgttgtggtttatgtttataattttagtattttgggaggtcgaggtgggataattgtttgagtttaggggtttaagattagtttgggtaatatattgagattttgtttttataaaaaaaattttaaaattagtaaggtatggtggttagtatttgtagttttagataattaggaggttgaggtagaaggattatttgagtttatgcggttgaagttgtagcgagtcgtgattatattattgtattgtaatttggatgatagagtaagacgttgttttattaaaaatattgttttttgagtatgagggtttaagtgttttgatatttgtagaagttagagatttgtgtggatttgtaaaatgaggaggaggtggatttttgtttttagggttttatattttttttaaggaagtaaataaagatgtaggatattaatgggaaatagattgatttatttttttttaggttaaaaagagtggtttatttgtcgggatggtggtttttgtttgtaattttagtattttgggaggttaaggtaggtggattacgaggttaggagattgagatttttttggttaatacggtgaaaatttcgtttttattataaagtagaaaaaaattagttcggtgtggtggtatgtgtttgtagttttagttatttaggaggagaattgtttgaatttgggaggtagaggttgtagtgagtcgagattgtattattgtattttagtttgggtgatagagcgagatttcgttttttaaaaaaaaaaaagtggtttattggggtaagtttttttttttttttttttttttttttttttttagtagagatggggttttattatgttggttaggttggtttttaatttttgattttatatgatttattcgttttggttttttaaagtgttgggattataggtatgagttatcgtgttttgttaatagttgttttttaaaatattgattgttaggtcgggtgtagtggttgacgtttgtaattttagtattttgggaggttaaggtgggtgtattatttgaagttaggagttcgagattaatttggttaatatggcgaaattttgtttttattaaaaataaaaaaattagtcgggtatggtggtggtcgtttgtagttttagttatttaggaggtcgaggtatgagaatcgtttgaatttgggaggtgaaggttgtaatgagttaagatcgtgtttttgtattttagtttgggtgatagaatgagatttcgttttagaaggaaaaaaaaaatgtgtgtgtatatatatatttattgtttagtaaatatatatttatttattgtttagtttgggtaatatgatgaaattttgtttttataaaaaaaataagtataaaaattagtttggttaggtggcgtatttttgtgattttatttattggggaggttgaggtgggaggattatttgagtttaggaagtcgaggttgtagtgagtcgtgattgagttattgtatttcgatttgggtgataagagtgagattttgttttaaaaaagaaaaaaaaataagtcgggtgcggtgtttacgtttatagttttagtattttgggaggttaaggcgggtggattatttgaggttaggagttcgagattagtttggttagtatggtgaaatttcgtttttattaaaaatataaaaaattaatttggtggaggtggcgtatttttgtagttttagttattcgggaggttgagaatcgtttgagattaggaggtggaggatgtagtgagtcgttttaaaaaaataataataataaagtatagattgtattttaaaaatatgcgagtgtttattgtgtattaggagttgtataaaaggtttttatatatattaaaagttatttttttatttgatattttaaataaaatgttttatatgtaattagtatttttattagtattttgattatattaagttggtatttgtttaagtttgtaagttttataaaggttttgttaaaaattaaatttttaagaatatttttgtattagg

SEQ ID NO: 6 - DNA, 9884 bp, Artificial Sequence
  chemically treated genomic DNA (Homo sapiens)
tttagtgtaaaagtatttttaaaaatttgatttttaataaagtttttataaaatttataagtttaaataaatgttagtttagtgtgattaaagtattggtgaaaatgttaattatatataaagtattttgtttaaaatgttaaatgggaaagtagtttttgatatatgtgaaaattttttatatagtttttagtatatagtaaatattcgtatatttttaaaatgtagtttgtattttattattattgtttttttgagacggtttattgtattttttattttttagttttaagcgatttttagtttttcgagtagttgggattataggggtgcgttatttttattaggttaattttttatatttttagtagagacggggttttattatgttggttaggttggtttcgaatttttgattttaagtgatttattcgttttggttttttaaagtgttagaattataggcgtgagtatcgtattcggtttattttttttttttttttgggatagggttttatttttgttatttaggtcggagtgtagtggtttaattacggtttattatagtttcgattttttgggtttaggtgatttttttattttagtttttttagtaggtgggattataggagtgcgttatttggttaggttaatttttgtatttattttttttatagagataggattttattatattgtttagattgggtagtaaataaatatatatttattgggtagtaaatatatatatatatatatattttttttttttttttgagacggagttttattttgttatttaagttggagtgtaggggtacgattttggtttattgtaatttttattttttaggtttaagcgatttttatgtttcggttttttgagtagttgggattataggcgattattattatgttcggttaatttttttatttttagtagagatagggtttcgttatgttggttaggttgatttcgaatttttgattttaggtgatgtatttattttggttttttaaagtgttggaattatagacgttagttattgtattcggtttggtagttagtattttaaaaagtaattattggtagggtacggtggtttatgtttgtaattttagtattttgggaggttaaggcgggtggattatgtgaggttaggagttggagattagtttggttaatatggtgaaattttatttttattaaaaagaaaaagaaaaagaaaaagaaaaagaaatttgttttagtaaattatttttttttttttgggaaacggagtttcgttttgttatttaggttggagtgtagtggtgtagtttcggtttattgtaatttttgttttttaggtttaagtaattttttttttgagtagttgggattataggtatatgttattatatcgggttaatttttttttattttatagtagagacggggtttttatcgtgttagttaggaaggttttaattttttgatttcgtgatttatttgttttggttttttaaagtgttgggattataggtaggagttattatttcggtaggtaaattattttttttagtttgaaggagagtaggttagtttgttttttattagtgttttatatttttgtttgtttttttaagaagaatgtaggattttgagggtaggaatttattttttttttattttgtaggtttatataggtttttgatttttgtaaatgttagaatatttaagtttttatatttaaaagatagtatttttagtgagatagcgttttgttttgttatttaggttgtagtgtagtggtgtaattacggttcgttgtagttttaatcgtatggatttaagtgatttttttgttttagttttttgattatttgggattgtaggtattggttattatgttttgttaattttaaaattttttttgtagagatagggttttaatatgttgtttaggttggttttgaatttttggatttaagtaattgttttatttcggttttttaaagtattaggattataggtatgagttatagcgtttaattataagatatatattgagtaaaatttggattatagaaaatttcgaagtgtaatagaagaaattataaaattttagattaataaatttgattgtataaagtgtttttaaaatttatatatatatattattttatagatgaggaggtaaagttgaggaaagttgaataatttgaatacgggtatatatattttttggtttgaaaggagttaaattgggaattaaattcgggaatgtttagtgtaaaagtttgagggtttgaggattgttttttattgtgttatgtttatattggatgttagaatatgtgaattatatatatatatatatatatatatacgtgtatatatataaaaatatatattttaaaatatgtatataaatttataagtaaagtatgaggaagaaaataaaattatttgtaaaagaggaattataagaaaataattaaatgtgtattttttttggtgataaaaacgtaaatgaaagttgaataaggtattaagttttgtttattgaatgagtagaaaaaaagataatagttatgattgatagagtgaaattagtattcgtatatattattgggaatattgagaataggtttattttttaggaaattattttggttttatatattaaaagttttttaatgtttttttgttagttaatggtttttttagttatttagtaggtattattgagaatttgttatgtgttaggtattgaattaggtattattggagtaagtagataggagtgtgggtttttattttaagggtagttatgttagttttggaatgattaattaggggtttgtagatgagagagaaataaattttttttttgtttaggttattgttgttttggggttttttattatttgtagttaaattgaattttatttatatagaaggtaagtgagtttttattagttgttttggttttttttttttttttttttttttttttttttttttttttttttttttttttttttttttttttttgaaaaaaaatttttttttggggtttcggggggggggggggggggggatttggggtttcgggaattttttttttttattgttaataaaatgtaagtgtttttttttttaaggtatttaatttttattattttgattttagatgtattttaatggagttgtaggaattttaagataaatagttttttataaggggtaaaatttaaagtagttttaattttatttaaaaataataataataataacgataataagcggtcgggtacgacggtttatgtttgtaattttagtattttagaaggtcgaggcgagcggattatttgacgttaggagtttaagattagtttagttaatatggtgaaatttcgtttttacgaaaaattataaaaagtagtagggtatgacggcgggtgtttgtaattttagttattcgggaggttgaggtgggagaattatttgattttgggaggcggtggttgtagtgggcggagattacgttattgtaatttagtttgggcgattgagcgagatattattttaaaaaaaaaaaaaaaaaaaaaaattaggtaaataaaaattgaataaatgttagagttagattagaaattaagagttggggtatgtggatttattttatttttttaataaattttgtagttatttggaattttttttagttttttttttaagttgtaatattgcgattggttattgttaattttgaagtttttattttttataggagttagatgaaaatcgttaaaaatgtttttttgttaatagaaatttaagatgttattagcggttgttaaggtagtaaaatagttaatatgtttattttattttttaaattgagattatttttagaataaaaaaaaagtgttagtgttaatgcgtttatattgaaattatgttaattttaagggaaataaataacgaagggtattaatttttatagttattttttaattttgtttttttttatttgaattttttattattaaaaattatttaaaattaggtggaaaatttaaggataaattttttaaatacgtttaagtgttataaagtatatattttgtcggagagataatttagaaattagttttattgttgttatagtgttggttatatgaaatggttttttgtatttgtaggacgtttttacggtcgtttcgtatttagtattaagagaaagtttacgtaagtattttaaaaattatttttatttattttttttttttaaattgagttttaggtagaggtgaaatgttgggtttgttgatttttatataatgttagattttattgattagttttaataagagttgatagtagttttttgatttttagcgggacgcgattttaagaatcgaaagagaggaattttatcgatttagaataggtttcggagagttagcgtttaagttttgatttttatttaagattttttttttagggtcgttgttagtcgaagataggaattttgaggttttgtttttggatattatcgagttaattgtttgttttgtattattttgtttttgcgtaggtgacgagtaaaagggtatttgtgtcgtttgttttgtttagtcggagaagttacgggtgtaagatggcggtattcgttatagtttttcgtttttttgtagagagcgttcgagtcggcgtattattattttgtagttttattcggtcgtttgtattatgtcggttttcggtgtttattagttcggttcgtcgaggaagggcgcggattacggtcgtagtaacgcgtacggatagtatttttgtagttatttcgtaggcggtatttttgtagtcgtagttttcggattgattgggataaaatggtcgagtcgtaaagaaggttaagatagtcggtttatttgattcggaagtattgtttttcgcgtttattattttttttttcgttttcgtcgttattttgtattttttggtaggttatttatttttttatgtaatatttttaagtttaaattttaaaatgaatgattagatatatttcggttttggttttggtattcgttatatatttattttggttttttgagtcgattttgtggttgtttcgggtgattacgtgggtagttgaatttgttaagtagtagtttttaggttttatttggtgttagaggatgagggttttattcgtttggggtcgcggttgttttgaggattagggcgattaatagtgtcggtagtgttagatcgtggtttagtacgagtagtaatagtgaatagttaaatttcgggattggttattagtagggagttttttacggagttcgttaatttgtagattttagttttattttagattttttgagtcgaaaattcggggtaatttgaatttttaataaatattagtatcgttttacgtgattcgatttgcgtttaggttaaagatttttagtttttttagatttattttaaaagaattttgttagtgaattagagtaaattgtttaaaaattttgataatcgggggaggggagtattaagataaatagttaatatatgcggagtttaatatttaggtgatgggatgatagttatagtaaattattatggtatatatttatttgtgtaataaatttgtacgttttggatatgtatttcggaattttaaattaaaaaaaatatattaataattataaggaggtttagaagagttattgttaattttattgagaattgtttagaattagaagtttatattaggataggacgaggattcgtttttttttttgttaatatttagtttatgttattgggaattttgtttttttatttggagttaaagggagatgatgaaaaaatattttttatgtttatttggatgggttttttttttttttttatagaattattatattgagattttggtgatatatgtaagattggtgtgtgtgtgtgatgttggtattattatgttatagtggatatttattaacgttgtttttattttttttttttttttatttatttattttattttatttaagatagggttttattttgttgtttaggaaagagtgtagtgggtttattattatttattgtagtttggaatttttgggttggagtaattttttgattttagtttgtgtttttgtggttttattattatgtttggttaatttttttgtaaagacggcggtggtgggtagggcgtggggggaggtttttttatgttgtttaggttggtttcgaatttttggttttaagtgattttttttttttagtttttgcgttgggttcgttttttatcgtttggagaagtatttttagttttattttttaaattttggtttatatttagaatttgaattttggtgaggtaaataaatattcgggttataagggttattttttgaaatatggtttgtaaatacgtgattagttatttttttttttagtattttattttttttaaggtaagttatgggaaaatagagtagtagtttttttgggaattaggggtataaaaaggttgtttaagttaggcgtagtggtttacgtttgtaattttagtattttgggaggttgaggcgggtggattatttgaggttaggagttcgagattagtttggttaatatggtaaaattttatttttattaaaaatataaaaattagttcggtatgggggcgggtatttgtaattttagttattggggaggttgaggtaggagaattgttttaattcgggaggtagaagttgtagtgagttttagattgtattattgttttttagtttgggtaataaaagtgaaattttatttaaaaaaaaaaaaaaaaaaaaagaaagaaaaaaagaaaagaaaaagaaaaaggttgtttaagtaaaataaaatatagagataaatttataaatttaaaatatttgggaagtaataattgttatttagggtatatatataaatagggtggtttttggtacgttagaagaataaatagatggttagaggttttatttttgtaaaagagaaatatagttaggaatagtggtttatgtttgtaattttaatacgttgggaagttaagatgagaggtttatttgagtttaggagtttgggagtgtagtgagttgtgattatatcggaatattttagtttgggtaataaagtaagattttatattaaaataaataataaaaaaagagaattgttgtatattgttttttaagaaagtttattgttattagtaaggttttggggagttggtaagttttgattggtaagtaatggtaattaggtaaaacgatttttagagttattgtaggttgtttttagtagttaattagataaaattggtttaggttagtcgggtacggtggtttacgtttgtaattttagcgttttgggaggtcgaggcgggtggattatttgaggttaggagtttaagattagtttgattaatatgatgaaatttcgtttttgttaaaaatataaaaattggttgggtatgttggcgggtgtttgtaattttagttatttgggaggttgaggtaggagaattatatgaatttggaggtagaggttgtagtgagttaaaattatgttattgtattttagtttgggcgatagagtgagattttattttaaaataaataaataaaaaaattggtttaggttatagcgggtagttttagtagttaggtttatagataattatatttttggagtaatgttatgtgttttgagtgtttttttttttttttattttttgatattgttttagttggggatgataagaatgatttaattaatttttataagttaataggaaaaaatatcgtttttaaaaataataaggtcgggtatggtggtttacgtatgtaattttagtatattgggaggttaaggtaggtagatcgtttgaggttaggagtttaagattagtttggttaatatggtaaaatttcgtttttattaaaaaattaaaaattagttgggggtggtggtgtatatttgtaattttagttatttaggaggttgaggaaggagaatcgtttgaatttaggaggtgaaggttgtagtgagttaggtggaggttgtagtgagttaagattgcgtttttgtattttagtatgcgcgataggagtgagattattttaaaataataataataataataataaaattagtcggtatggtggtttatatttgtaattttagtattttgggaggttgaagtaggttgattatttgaagttaggagtttaagatgagtttggttaatatatcgagatttttgtattttttgttttatttttagttgggtatggtggtatatgtttgtaattttagttatttaggaggttgaggtacgagaattatttaaatttgggagatggaggttgtagtgattattgtattttagtttgggtaatatagtgagattttgtttgaaaaaaaaaaaaaggtcgggtatggtggtttatgtttgtaattttagtacgttgggaggttgaggtgggcggattacgaggttaggagatcgagattattttggttaatatggtgaaatattgtttttattaaaagtataaaaaattagtcgggtgtggtggcgggtttcgtgtagttttagttattcgggaggttgaggtaggagaatggcgtgaattcgggaggcggagtttgtagtaagtcgagattgtttaattgtattttagtttaggtaatagtataagattttttttaaaaaaaaaaaaaaattgtagggatattttgtaaaatttgtagtgataaaagtggataaaagatataaagataattttttttgttttatattgaagggttgtattagtttatttgaaatttggttatagagtagagatatatttagtttttgtttttttttgttttttgtggtggatttttaatttgtcgtttaggttggagagtagtgttttaattttagtttattgtaaattttgtttttagggtttaagtgatttttttgttttagttttttaagtggttgggattataggtacgtgttattatgtttggttaatttttgtatttttagtagagatggggttttgttatgttggttaggttggttttgaatttcggattttaggtgatttatttgtttcggttttttaaagtgttgagaatataggtgtgaggtatcgtatttagttagagtagagatatgtttgaagtaaaaagaataagtaagataggttgggtgtggtgttttatgtttgtaattttagtattttgagaggtttaagtgggagtattatttggggttaggagtttaaaaatagtttgggtaatatagtgagattttttttttataaaaaatataaaaagttagttgggtgtggtggtgtacgtttatagttttagttattaaggaggttgaagcgggaggattgtttgagtttaggagtttaaggttgtagtgaattgtgattattattatattttagtttggacgaaagagtaagattttgtttttaaaaataaaataaaataaataataaataagtttggtttgttagtaagttttttttgaaaagaaaattattttaggttgggtgtgttggtttatatttgtaattttagttttttgagaggtcgaggtaggtagattatttgaggttaggagtttgagattagtttgattaacgtggtgaaatttttcgttttattaaaaataaaaaaattatttttgtatgttagtataagtttgtaattttagttattagagaggatgagataggagaattgtttgagtttggggacgggggttggaggtcgtagtgagttaagattatgttattttgtattttagtttaagcga

SEQ ID NO: 7 - DNA, 5525 bp, Artificial Sequence
  chemically treated genomic DNA (Homo sapiens)
atttttttttatggtaattgggattagattgttttatttttcgatatttttgtaagatttttttatgaatattttgatatttttttgagtttggagaaaggcgttttttttgtgtatttagtttgataaattttttagttatagtttttattttggtatgtaaagttttgtatttattatattttgtattgacgttatttttataatttcggcgttgtttataggagatgatagtaatatattttattaaataatttgggagtttaattgttgaaggttttatggaggtagtgtaattttttttagtttttttattggaatttggattggagttatttagtttggtaattttttttttttttttaagatttttttttttttttttaatagttttaatgtcgtgtttttttatttggtttttttttttatgttttttagatttttttttggattttttgtgagatattgaatggtttttttttataggttttggatattttaatagaattgaattagggggtaaggtttttagagaagttttagaggtatatttgttttgttggtttttatagatattattgttttgattaaaattgttaataggtaggttttgagttttcggttttttggagtgttaggggaattggagttagaatttataatttgaggaggatgtgaaatcggtagatgggttgaaggtaagcggtggaggggtggggatggtagtagttgtagggggtagagggaggtttgtagtagattttttattggtgggatttaaatgattatttagtgttggtggtattttgttcgttaggtgagatattcgggtttttttatttattaaatgattaataaattttgaatttaaaagtcgtgtttgaggagaagatatagcgtttttattagaatatattggagattttgaacggttggtgtttgtagtattttgagatggatttagttttttagagagtattgattttaatgattaagtgtttattttattgtatttaggttagtttttttgaagttttttaaaaatataattttttgaagtatacgagaggtttttaggatttagattggttatttgttgtagaattgtttttagggagtttttgtttttttgattgatattatttttttggagtttagtaagtagtttcggttttttgtaggtttttagggttagtaagtgaattattttgtttttgtatggtttttgagagacgttgttgttgttgtgtgtttatcgaattggatttgtagggtttatgggggttgattttttttttttaggaattgtatttgaaatagtttgaggtgtttttcgaatttgtatttttttttttatatatggtttatcgggtttgataatttttgtgtttcggttgcgggattttttttttgtttgggtcgttttttttcgtgttatttgattcgagtcgtttgttgtatatattgtaattttattttgtataaattttaggtaattgagttgggaggttttagagttggagaatgtttgttggacgtagttaaagttgttttgagggttgtttttgtttatatttgataaataaaagttaaagttatgaattttattgaggggattatttttgggaattttgataagtttttggagtttttggaattgaattgaaggtcgaaaagaaattaaatttttgtggttttggtaagtttggagcgtttggatcgtcgattcggtgagttttatatgtagtacggtgatgttgttttgttttagtcgttcgtattagagtttatagcgttgtttcgcgatttttttattttcgatattttaaatttttagaggtgtcgtcgtcgttagtttagttttagtttttattgcggtcgtagttatttgggtttttgtagtcgtcgttattgttagggttatttcgttgttggcgtattgttatatattgcgcggagttagatttcggattgttatcgtcgttatttgttttattttttggtttcgcgtttcgttttaggttagttttattggtttagtttttttagaatcgtttttatcggtcgttttttatttttacgggggcggggtttaaagtcgttggagttttgtttttgggattggacgttcgagaggtaagagagttattataaggttttttaatttttatgttttttttagtggatttttaggttattgtggtttgtattattaggttatttataaaaatgaatatttttttaaattaggttattttatagtaaattacggtttttgattattattatgttttgaataaagattatgagtaattgtatttgaatgttgttgaattttattgattgaattttgaattgtttgattttgattaggttggtttgtggaaagtgttattaagaagagttttttagttcgttggtattatttttttgatagttattataaaagtttttttgatgtatttttttaagaattttaaatttttatatgtagttattttttgtatattaaatggtttttttatggttaggataataaaaatatgaagaaagtatataagattttaattaatttgacgttgtgaattgtgaattttgaattgaaattaagtaagttttttatgattaggttttaaggttttggttagttttttaaaattgagaggttgaaattttttgattaaaattaatatatttgttttttttttttagtttttggaaattattattttaattttgtttttataaaatagtaaattattttagagtttatatataagtgagattatgtagtatttatcgtgggtttattttaaggttttgagtaaattattatttttttgtgttagggtattttgagttagttttgttataaattattttgtttaggtaatatattgtaaaacgttttataatttaatggttttttttttagaaaaaaagtagtgaaagttttaatagttaaaaagtgtttaatttaattgatttttgggaaaaaatattcgtataattttagatagttttaatttttgaaggtaatatagtttggtttttgttgataaataaataaaaataaaaaaattatatatatatatatataaattagttttttgtttttaagtgtgtaagaatgttagtatttaaaatttttaagatatataaaaattaaatagaattgtttaagtttttaaagggagtttggaaatttgaagaaagtaaagttaaaaatattgttttatgagttatataattatttttttttttattttttatagttttttttttatttattatttaggtaattttgtatttaaatttaataatttaatattttatttgttataagaatacgttattatgttattttaagtttttttgggtaaattatatataattagataggttgggttagggttgtttataagattttagtttagagtgtggtgtagtagtttattttttttaggatttttgttgtaataggatatgggagaagggaaatattaacgttagtagaatgggaggaattagattatggagatatgatttttgttttttggtatttttttagttgatttagaagaggatatagagggagatagatatatggttatttttataattataaattttgttatatgttgagaggatggttttttaaagttagttagtgtataagtagtggaggttgggattgttttattttttttgtttagggttatatagtttggtagatttggaaagatttttttgagaaagtgattttggaattgatattttagtggaaataattaggtattgggagggggtgaggtgaggagaaggttaagaatttttatgtagagggaattttgtgtagagattttagttaggaagaggttttgtatagtggaggaattgaaagttaatagttaggttatagtatagagtaaatgatgttggggtgtgaggtgatgttaaaaggtagatattagggttagagggcgtataattttgtaggtcgtgttaatgattttgttttttatttaagaatgttattttaggagattagttaaaaggttagggtgatggtgacggtggaaatatagaaaaaggaatttatttaagaggtatttaaaaagaagtgaaatagagatgagttggagatagattggataaaaagagtgagggagagggaggtgttaggttgtagtttaggttttgagttgttaaagaggagtttttttttttaggtgagttaaggtttagaattacgatttttggttatttttttttatttttagtgtgagaagtggcgagttggttgtttaggtatatattgttattttatatttattgtttaagatagaggcgtatatttggaaagtgaatgagttaggagttagaggagaaggtatgtcggtagaggttagggcggagaggaggaagagagtttgggggcgcgtttttaaaaaggagttagggaagatagagtagaggtcggggaggggagagtaaggattatgataggaggaaagagaggttagggaatattgaggtggaggaattttgggatatgatagttgtaaagaattgtagttaatttaatttagtttttttaatgtgtaattgaggaaattaatttttatgcgtttattttattgtaaatgtggtatttgtatttgagaaattttggaaaatataaagatgtaaagtaaattaagattatttatagtttttttatttagagatatgtattgttaaagtaaggattttgatttttttttttttttgtatttttattatggttggaattgtaatatagacgtaattttatgttttgtttttaaaatataaataatggttgtaaagcgttttatacgttgatttaaagttttttttgaaataggaaattgagatacgtcggttgtgaaatttattgaagtgagcggcggcgttaggatttttgggatttcgatttttttgtagttcgtatagttaagggcgagggcgtttttcggtagaagtagtaaatcgtcggtaagtttagcgaggagggttgtcggggtttgggtttgggaattggttggtatttagcggaaagggacgtgagttgagcggcgggggagaagagtgcgtaggttagaaggcggcgcgtagcggcgtttcgcgaggtttttacgtcgggcgatatggggtgtttgttgtttttgttgttttgggcgtttttttaggtttggggaagcgttgaaggtgggtggaacgagggcgtttgagtgtattcgcgggagggcggagagagggagttgggtagggacggggagggtaacgtttgatggggattggtgagattcgggacgtattggcgcgatttaggtagaaaattcgttgttttttggtttcggggagaggtagcgcggtatagagttcgttggtattagtcgttttttgaagtttatttttttttgttttttttttttttttttttatgttggttgttttttcggttatttgttacgcgtttttaatttttatttttttttagt

SEQ ID NO: 8 - DNA, 5525 bp, Artificial Sequence
  chemically treated genomic DNA (Homo sapiens)
attgggagagaatgaagattggaggcgcgtagtaagtggtcgggagagtagttagtataaagagaaggaagaaagaaataagaggagatgagttttaggaggcggttgatgttagcgaattttgtgtcgcgttgttttttttcggagttagggagtagcgagttttttatttagatcgcgttagtgcgtttcgggttttattagtttttattaggcgttgtttttttcgtttttatttagtttttttttttcgttttttcgcgagtgtatttaagcgttttcgttttatttatttttagcgtttttttaagtttggaggagcgtttagagtagtagaaatagtaggtattttatatcgttcggcgtggggatttcgcggagcgtcgttgcgcgtcgttttttgatttgcgtatttttttttttcgtcgtttagtttacgttttttttcgttgggtgttagttaatttttaagtttagatttcggtagtttttttcgttgggtttgtcggcggtttgttgtttttgtcgaagggcgttttcgtttttagttgtgcgagttgtaaagaggtcggggttttaggaattttggcgtcgtcgtttattttagtaggttttataatcggcgtgttttaattttttgttttaaaggagattttgggttaacgtgtgggacgttttataattattatttatgttttggaagtaggatataaggttgcgtttgtgttataattttaattatggtaaaaatgtaaagggaaaaaaggattaaagtttttgttttagtagtatatgtttttaggtggaaagattatgagtgattttaatttgttttatatttttatgttttttaaaattttttaagtgtaagtattatatttataataaagtaaacgtatgaaaattaatttttttagttgtatattgagagaattggattaggttggttataattttttataattgttatattttaggatttttttattttagtgttttttagtttttttttttttttgttatggtttttgttttttttttttcggtttttgttttgttttttttgatttttttttggggacgcgtttttagattttttttttttttttcgttttagtttttgtcggtatatttttttttttggtttttgatttatttattttttaaatatgcgtttttgttttaaataataagtgtaagatgatagtgtgtatttggatagttaattcgttattttttatattgaaaataagaaaaagtgattaaaaatcgtggttttaagttttagtttatttggaggaaaagatttttttttggtaatttagaatttgggttgtagtttgatattttttttttttttattttttttatttaatttatttttaatttatttttattttatttttttttgaatattttttgaataaatttttttttttatatttttatcgttattattattttaattttttgattgattttttgaagtagtatttttgggtagaaaataaaattattagtacggtttgtaagattatgcgttttttagttttggtgtttattttttgatattattttatattttagtattatttgttttgtattgtagtttggttgttagtttttagtttttttattatgtaaaatttttttttgattaaggtttttgtataaagttttttttatatgaaagtttttgattttttttttattttatttttttttaatgtttagttatttttattaaggtattagttttaaggttatttttttagggaagtttttttagatttgttagattgtgtgattttaggtaggagaagtagggtagttttaatttttattgtttgtatattaattggttttgagaagttatttttttagtatgtagtagagtttataattatagaaatggttatatgtttgtttttttttgtgtttttttttaaattagttggagaggtgttagaaggtaaggattatgtttttataatttgattttttttattttgttaacgttaatgtttttttttttttatattttgttgtagtaagagttttagagaaaataggttattgtattatattttaggttgggattttgtagatagttttaatttagtttatttaattatgtgtaatttgtttaaaaaagtttaaaataatatagtaacgtgtttttgtaataaataaggtgttaaattattaaatttggatataaaattgtttaaataatggataggagggaaattatgagaaataaaaagaaaaataattatatgatttatggggtaatatttttaattttattttttttaaatttttaagttttttttaaaaatttgaatagttttgtttagtttttgtgtattttaaaaattttaagtgttaatatttttgtatatttaaagataagaagttggtttgtgtgtgtgtgtgtgtggtttttttgtttttgtttgtttattaatagaggttaggttatattatttttagaagttaggattatttggaattatacggatatttttttttaaaggttagttgagttagatattttttggttattggaatttttattgttttttttttgggaaaggaattattgaattatgaaacgttttgtaatatgttatttaaataaaatagtttataataagattgatttagaatattttagtatagagagatggtgatttatttagagttttaaaataagtttacggtgggtattatatgattttatttatatgtggattttaaaatagtttattattttatggaaatagagttagggtagtggtttttaggagttggagggaaggggtaaatgtgttaattttggttaaagggttttagttttttaattttgagaggttgattaaaattttggagtttgattataagggatttatttggttttagtttagaatttataatttataacgttaaattagttggaattttatatgttttttttatgtttttgttattttaattataaggagattatttaatgtataaaggatagttgtatatgagaatttaagatttttgagaggatatattagggaaatttttataatagttattaggaggataatattaacgaattaaagaattttttttaatagtattttttataagttaatttgattaaaattaaataatttaaagtttagttaataaagtttaatagtatttaagtgtaattgtttatagtttttatttagagtataatggtgattaaggatcgtagtttgttgtaaaatggtttgatttaaagaggtatttatttttgtaagtagtttgataatataaattatagtaatttggagatttattaaaagaaatataaggattagaaaattttgtgatagtttttttatttttcggacgtttagttttaggagtaaaattttagcgattttgggtttcgttttcgtgaaagtggaaggcggtcgatgaggacggttttgagggaattagattaatgagattagtttggggcggggcgcggggttagagggtggggtaggtggcggcgatggtagttcgaggtttggtttcgcgtagtatatgatagtacgttagtagcgggatggttttagtagtggcggcggttgtagaagtttaagtagttgcggtcgtagtggaggttggagttggattggcggcggcggtatttttgggagtttaagatgtcgggggtgggggggtcgcggggtagcgttatgggttttagtgcggacggttggggtaggataatattatcgtattgtatgtgaagtttatcgagtcggcgatttaggcgttttagatttattagagttataagaatttaattttttttcgatttttaatttagttttaaagattttaggagtttgttaaaatttttaaaaatgatttttttaatgaagtttataattttaatttttatttgttaaatgtgggtaaagataatttttagggtagttttgattgcgtttagtaaatattttttagttttggagttttttagtttaattgtttgggatttatataagataaaattatagtgtgtgtaataaacgattcggattagatgatacgagaaagaacgatttaggtagaggaggaatttcgtaatcgaagtatagaagttattaaattcggtggattatatgtagggaaaagagtgtaaattcggaaagtattttaagttgttttagatatagtttttgagaggaaaaggttaatttttatgaattttgtaaatttaattcgatagatatatagtagtagtagcgttttttagaagttatatagggatagggtggtttatttattggttttgaaggtttataagaaatcggagttatttgttagattttagaaagatggtgttaattaaaaagataggaattttttgggagtaattttgtaataggtagttaatttgaattttaaggatttttcgtatattttaaaggattatgtttttaaagagttttagagagattggtttggatatagtgaaatagatatttggttattggagttaatgttttttagaaaattaaatttattttagaatgttgtaggtattagtcgtttagaatttttagtatgttttagtagaaacgttgtattttttttttagatacggtttttggatttagagtttattgattatttaatggataaaaaagttcgaatattttatttgacgagtagagtattattaatattaaatggttatttgaattttattagtgaaaaatttgttgtaggtttttttttgttttttgtagttgttgttatttttatttttttatcgtttgtttttaatttatttgtcggttttatattttttttagattgtaaattttaattttaatttttttagtattttagaaggtcgggggtttaagatttatttgttgatagttttagttaaaataatagtatttatgagaattaataagataagtatatttttaggatttttttggaaattttattttttggtttagttttattaaagtgtttaaagtttatggaagaaaattatttagtgttttataaaaagtttaaaaagaagtttaaaaaatataaggaaaaggattaaataaaaaagtacgatattgagattattgaggaaaaggagaaagattttaagagagaagaggaaattgttaagttaaataattttagtttaaattttagtggaggagttaaagaggattgtattgtttttatggaatttttagtaattgaatttttagattatttgataaaatatattgttattattttttatgagtaacgtcggaattataaagatgacgttagtgtagagtatgatgagtatagagttttgtatgttaggatggagattgtagttagaagatttattaaattagatgtataaagaaagcgtttttttttaggtttaaaagagtattagaatgtttatgaagaagttttataagaatatcggaagataaagtagtttagttttaattattatgaagaaaaat

SEQ ID NO: 9 - DNA, 6621 bp, Artificial Sequence
  chemically treated genomic DNA (Homo sapiens)
tttgtatttttagtagagatggggttttttttttttttttttttttttttttgagagggagtttcgtattgttatttaggttggagtgtagtagtgttatttttatttattttaattatcgttttttaggtttaagtaatttttttgttttagttttttaagtagttgggattataggtgtttattattacgtattattaattttttgtatttttagtagagatggggttttattatgttagttaggttggttttgaatttttgattttatgatttatttatttcggttttttaaagtgttgggattataggcgtgagttattatgttcggttaagatggtgttttatcgtgttggttaggttggttttgaatttttgatttcggttttttaaagtgtcgggattataggtgtgagttattgtgttcggttaggagttttattgtgaagggaaggaatgaatatagttggaggggaaagtggtattaaggaaaggttttttattattaataataaatattttattgaaatatattatttatatagaatagttaataaattttgagtgtgtagtttaatgaatttttataaggtgaatatatttaggtaattagtatttagattaagaaatggaaagtggttaggtgtagtggtttatgtatataatgttaatattttgggagtttaagacgggaggatcgtttgagttcgagagtttgagattagtttgggtattatagttagattttcgtttttaaaattatatatatatttttttttgagatagagttttgttttgttgtttaggttggagtgtaatggtatgattttagtttattgtaattttcgttttttgggtttaagtgattttattgttttagttttttaagtagttgggattataggcgtgtgttattatattcggttaattttttgtatttttagtagagacggagttttgttatgttggttatattggtttcgaatttttgattttatgatttatttatttcggttttttaaggtgttgggattataggcgtgagttattatgtttagttaaaataaaaaataaaatttttaattagttaggtttatgggtgtatgtttgtagtttaggttatttaggaagttgaggtgggaggattatttgaatttagaagttcgaggttatagtgagttatgattatgttattgtattttaatttgggttatagagtaagattttgttttaaaaagtgaaaaataaataagaaatagaatatgattagttgttaatattttttttatggttttttgtagttattattatttttttgaaaggtaattagtattataattaattttttttttttttgagacggagtttcgttttgttatttaggttggagtgtagtggtttaatttcggtttattgtaatttttattttttgggtttaagtaatttttatgttttagtttttatagtagttgggattatagttgtgtattattatatatggttaatttttgtgtatgtatatatgtgtgtatatatatgtttgtgtatattatatgtgtgtatatatgtatattatatatgtgtgtatatatgtatatatatatatatatgtatatgtatatatatatatatatgtatatgtatatatatatatatatgtatatgtatgtatatatatatatgtatattatgtatatatatatatgtatgtatattatgtatatatatatatatatatgtgtgtgtgtgtatatatatatatatttttttttagtagagatgaggttttattatgttggttaggttggtttcgaatttttggttttaagtgattcgtttgttttagttttttaaagtgttgggattataggtgtgagttagatttaaatagtatgttttttttgtgtttttttttttatgtttgatagttgatgtgagatttatttttattgtgggtagcgtttttgttttttttattattgtataaaataattttgttttatttatttattttattgttgatgggtattagggttgttttttgtttggagttaaaatgattaatatggttatgaatatttgtgtatatgtattttggtatatttgaattgtattgtagtttttgtgttaatttttttttttttatggttttttgtggttattttttcgtttttttatatgatttttatagttgtttgtgattttattttggttatttttagtgatttttttgggtgtatttttgaattatggattcggttatttttttgtggtttttattttagttttagttttgcggttttgttttattatattaagtttttaatgttggtgttttttagatttagggttttaaaaattttttgtatatttttaatgggtattattatttttatgttaattaatattaaatttgttttttgattatattttttagttagtttattagtataaaattgagtttattaaatttttttaagaagtatgtttttaattgttgaaatgttatatttatttaggtatttgaattattatttaagaattattttagtttttttttttttttttagttttttataattttaatttttaattattaaaatttgatgagatttattttttttagggtttatagaattattttttttttttgtttttaaggtttttattttgttttagaattttttagatttttgagatagttattttttttttttttaggtttttttatttttttttattgatttattttaaagtaaatttgattcggttattatatattttttattgtttataggataaggttaaattttttagtaaattttaatttttttaagaattgttttttatagttagttttatgtgtttattttagaatcgattggattaatttaggagtagttttcggtaagtacggcgtttttttttattttttggttgtcgagggtcgtttttttagaaagtattttttattagttttaagttttttttttttagtaattttgatttttagttttaattttttttaggacgtgttttttatcgtattgttttttttagttttcgttttttttttaggtgtttattatttttttataaattatagttattgttatggtaataattttattattagaaggagttttatgtttagcggattagagttttttgagagtagggattgtggtattattttaagtattgaatttgttttagtaatttttaaataaatatatgttgaatgaatgaatgtagtaataggaatgttgagttaagttttgtttttgttttttgagacggagtttcgttttgttgtttaggttggagtgtagtggttcggttttggtttattgtaagtttcgtttttcgagtttagttatttttttgttttagtttttcgagtagttgggattataggcgttcgttattacgttcggtaattttttgtatttttagtagagtcgggttttattatgttagttaggatggtttcgattttttgatttcgtgattcgttcgtttcggttttttaaagtgttgggattataggcgtgagttatcgttttcggtttgttgagttaagtattaaattatataaaatataggaggagaggaaagtatttagagatacgatagggagaattatttgaaatagtgggattatagattatgtgaattgtgtagagaggtttaaatagtttggggtttttggagggaagggaggtttttgggtggtggagtattggtgtatagaaaaggagatgaattttgagagagaggttttttattgtgaagggtttggtgttggggttaaaggtttggggtttttatttgtttagtatggttttttaaattgtagggttttttttttttgagtggggggtagggggtgttttattttgttgtttaggttggttttaaattcgtgggtttaggtaatttttttatttcgtttttttaaagtgttgggatgataggcgtgagttattaagtttagtagtaggttgtaattaaattatgtatttatggtttttaaaattcgtttaggagttgttataggttcggcgttgtaaaagtaaatatgtttatttagaaaatggggataatttttatgttatagagttgtaaagattaaatgaattaatatagattaatatattgggaatagtgttaagtgtataagtattatgtaaattttagttattatttgttattattgtgtttgttgttatttttttttaggagtttttagggggttaagaagtggtgggaaagaaagaaatgattttaagagtatttaataagggttagaatggaagtgagtaaaaaatgttgaggtttatagtataggttgtattgcggggtttaaattttatgaggttagtagtatttagggtttgtgagttttttagagttgggttttggtggtcgagtttagttttgggggttattgtatttttttttttattataaaatggggtttggaggttcggggcggaagaaaggggtttataatattgtacggttagaggtcgagttaaggttggattcggttagatttttataggttttttttagtttttatattgttttagagtgtggggcgttcggttgggggcgaggtagcggaggtttaaagggggtcgaagttaattggacggtagttcgcgatgggaattacgttttttagtatgcgacggggtaaaggggttttttagtcgcgagtagcgtttcgtaggttttgttgggagtttttattgatttttgtttttttttttattttgattttcgtttttttgttttgggtttcgtttttttttgagagtcgatgatttggtagagtttcgcgagtcgttttttttttttttttttattggtttagtttagttgttattcggttgagaggaggagaagttgtttattgattggtggatttcgtttggcgttaattaggaaaggggggcggggtagtagttggttttattgagtcgttattatcgcgaaaggtcggtttggttgcgatagtttgggtaagaggtgtaggtcggtttggttttttgttattcggagttgggtaagcgggtgggagaatagcgaagatagcgtgagtttgggtcgttgtttcgaggttttcgttcggttttttttgtcgattcgttacgtttgtttggatttaatttttaggttgtcggcgttcgttcgttcgttggtttcgcggtgtgagagggaagtattcgtgtttgtggttggtggttggcgtttggagggttcgtatattcgttcggtcgcgtcgtttgttcgcggtagtcgcgtttttgaatcgcggagtcgtgtttgtgtttgattcgcgggcgtcggtggcgcgcggtcgaggtcggtgtcggcggggcggggcggtcgcggcggaggtagaggaagagggagcgggagttttgcgaggtcgggcgtcgttatggaattgggttcggagttttcgtatcgtcgtcgtatgtttttcgtttgtagtttttttttcgcgtcgtagttcgtcgtgaaggcgttatttggcgttttagtcgtcgggggattgtcgtttgttattaatttgatcgttattatggattagttgtagggtttgggtaggtaaggagagatcggcgggcggtgtttcgggtttttggtttcggtgtcggtttcggagagattaggttaggaaacggatcgggagaagggcgagattcgttcgttcgggttcgtcgttcggggatagtcgggttagggtttgttatgtgtattttcgttcgggcggaatgttgggcgggagaggtcgtcgggattttttaggggaagaggtggagatttttgggtttaagttcgagttaggtttatttttatttttttcggattgtttcgtattttttttttatttttatttttggaagttttttggaatttattttcgcggggaaaattaggtttttttaggtatttatttttattttttgttaaattatttttaggattttcgtttgttgtgatttttgtttttttttaataaaggattatggtatttttttttttggcgtttatgtaaaattattttagtttttcgttttgtgtatatttttgatgtttattttgttgtttttttaaggttaggtttttttatttaatttttagaaagttttttgggttttttttgatagtaaaaaatgtattttacggtgtttttcgcggaagagttattttttttttaatttttggtatttcgtttgttaagtatatgttttgtgcgttttttaatttttgaaaagtagaaagtgttttgtttaatttttatttcgattttgttttagtatttagaatatatgtttttattttaggaaatattttaatatttgttatagttattataatttgtaatgtggtttaaggttatgtttatttatttttttttttttttttgtttaagtgttaattgggtgtttagagtggtaaagtgggatttttgttatttgtggtgtggtttagaaatggtttttggtagtttggttgttttttaattttatggtttattttttgtatgtgattttttaattatattttataaattatttatggtttatttttgttggttttagt

SEQ ID NO: 10 - DNA, 6621 bp, Artificial Sequence
  chemically treated genomic DNA (Homo sapiens)
attgaaattaatagaaataaattatgaatgatttataggatataattaaaaggttatatgtaggagataggttatgagattaagaagtagttaggttgttagaaattatttttaggttatattataagtggtaaagattttattttgttattttgaatatttaattagtatttgggtaaaggagaaaaaaggagtgggtgggtatggttttggattatattgtaggttatgatggttatggtaaatgttggggtattttttaaaataaaagtatgtgttttaagtattgagatagagtcgggatgaaagttgaataggatattttttgttttttagaagttgggaaacgtataagatatgtgtttagtaaacgggatgttagagattgaagggaaagtagttttttcgcgggaaatatcgtgggatgtattttttgttattaggaaaagtttaggaagttttttgaaagttgggtaaaaagatttggttttaggaaagtagtagagtggatattaggaatgtgtatagggcgagggattgagatgattttatataaacgttaggaaagaaaatgttatggttttttgttgagaaggaataaagattatagtaaacgaagattttgaggatggtttagtaaagggtgaaagtgagtgtttagaagagtttgatttttttcgcgggggtagattttaaagagtttttagggatagagatagaaggagagtacggagtaattcgaaaggggtgaaggtgggtttggttcgggtttaggtttaaggatttttatttttttttttggaaggtttcgacggtttttttcgtttaatatttcgttcgggcgggggtgtatatggtaggttttagttcggttgttttcgagcggcgaattcggacggacgggtttcgtttttttttcggttcgttttttggtttgattttttcgaggtcgatatcgaggttaggggttcggagtatcgttcgtcggtttttttttatttgtttagattttgtagttggtttatagtgacggttaggttggtgataggcgatagtttttcggcggttgaagcgttaaatagcgtttttacgacgggttgcgacgcgggaggggggttgtaggcgaagagtatgcggcggcggtgcgggggtttcgggtttagttttatggcggcgttcggtttcgtagagttttcgttttttttttttttgttttcgtcgcgatcgtttcgtttcgtcgatatcggtttcggtcgcgcgttatcggcgttcgcgggttaaatataaatacgatttcgcggtttagggacgcggttgtcgcgggtaagcggcgcggtcgggcgggtgtgcggattttttaggcgttagttattagttataggtacgggtgttttttttttatatcgcgaggttagcgggcgggcgggcgtcggtaatttgaagattaaatttaaataaacgtggcgggtcggtaagagaagtcgggcgagagtttcgaggtaacggtttaggtttacgttgttttcgttgtttttttattcgtttgtttagtttcgggtagtagaaaattaagtcgatttatattttttatttaggttgtcgtagttaggtcggtttttcgcggtaatagcggtttagtggggttagttgttgtttcgttttttttttttagttggcgttaaacggaatttattaattagtaagtaattttttttttttttaatcgaatggtagttaggttgggttaatgagaggggaagaagaaagcggttcgcgggattttgttaggttatcggtttttagaagggggcggagtttagagtagaagagcggggattaaaatgagagggggagtagaggttaatgaaaatttttagtagaatttgcgaggcgttgttcgcggttgaaaggtttttttgtttcgtcgtatgttgggaagcgtagtttttatcgcgagttgtcgtttagttagtttcggttttttttgggttttcgttatttcgtttttagtcgggcgttttatattttgaggtaatgtggaggttaaggaagatttgtggaggtttggtcggatttagttttggttcggtttttaatcgtgtagtattgtggatttttttttttcgtttcgggtttttaggttttattttataatgagggagggaatgtaatgatttttaggattggattcgattattagggtttaattttggagggtttatagattttgggtgttgttggttttatgggatttgaatttcgtagtataatttgtgttgtgggttttagtattttttgtttatttttattttagtttttattggatgtttttagaattattttttttttttttattattttttagttttttgggagtttttagagagaaataatagtaaatataataatagtaaataatagttaaagtttatataatgtttatgtatttgatattgtttttagtgtgttaatttgtattaatttatttaatttttataattttgtgatataggaattatttttattttttaagtgggtatatttatttttatagcgtcgaatttgtggtagtttttagacggattttgagggttataagtgtatgatttaattgtaatttattgttgggtttagtggtttacgtttattattttagtattttgggagggcgaggtgggaggattgtttgagtttacgaatttgagattagtttgggtaataaagtgagatattttttgttttttatttaaaaaaaaaaaattttatagtttgaaaagttatgttggataggtggaaattttaaatttttggttttaatattagattttttatagtgaggaattttttttttaggatttatttttttttttgtgtattagtgttttattatttaggaattttttttttttttagaaattttaggttatttaggtttttttgtatagtttatatggtttgtggttttattgttttaaatagttttttttgtcgtatttttgaatatttttttttttttttgtgttttatgtggtttaatatttggtttaataggtcgggagcggtggtttacgtttgtaattttagtattttgggagatcgaggcgggcggattacggggttaggagatcgagattattttggttaatatggtgaaattcggttttattaaaaatataaaaaattatcgggcgtggtggcgggcgtttgtagttttagttattcgggaggttgaggtagaagaatggttgaattcgggaggcggagtttgtagtgagttaagatcgagttattgtattttagtttgggtaatagagcgagatttcgttttaaaaaataaaaataaaatttggtttaatatttttgttattgtatttatttatttaatatatgtttatttaaggattattagaataaatttagtgtttgaaataatattataatttttgtttttagggagttttggttcgttgagtataaagttttttttaataatggaattattattatgataatagttgtggtttgtggagggatggtgggtatttagaggaggggcggggattggggaaggtagtacggtggggggtacgttttaaaggagattaaaattaaaggttaaggttgttggagaaggggagtttggggttggtgggaagtgttttttaaggaaacggttttcggtagttaggaggtgaggaggaacgtcgtatttgtcgggagttatttttgagttgatttagtcggttttagaatgggtatatgggattggttgtgagggatagtttttgaaaggattggagtttgttgaagagtttggttttattttgtggatagtggagggtgtgtgataatcggattagatttgttttagggtggattagtggaggagagtggggaggtttgaggaaaaaggaggtggttgttttaaaagtttgggagattttgaagtaaggtgggggttttggagataaaggaagggaatgattttgtgagttttgaaggaggtagattttattagattttgataattgagagttaagattgtagggggttagagggaagggaggaggttagaatgatttttaggtaatgatttaagtatttgggtggatgtaatattttaataattggaggtatattttttggaggaatttgatgagtttagttttgtgttggtggattggttggggggtgtagttaggaggtagatttggtgttgattagtatgaagatggtaatgtttattgaggatgtataaagggtttttaggattttggatttggggagtattagtattgaggatttgatgtagtgagataggatcgtaaagttggggttgagatagaaattataagggagtagtcgagtttatagtttagaggtgtatttaggagagttattgaaggtggttagaatgaggttataggtaattatggaaattatgtaggaaggcgaggaggtggttatagaaggttatgggaagggaaaagttggtatagaagttataatatagtttaagtgtgttaaaatgtatgtatataaatatttatggttatgttaattattttagttttaaatagaaagtaattttaatgtttattaataataaaatgggtaaatagaataaagttattttatatagtgatgaaaaggatagaagcgttatttatagtaggagtgaattttatattaattgttaaatataagaaggaagatataaaagagatatgttgtttaggtttggtttatatttgtaattttagtattttgggaggttgaggtaggcgaattatttgaggttaggagttcgagattagtttggttaatatagtgaaattttatttttattaaaaaaaaatatatatatatatatatatatatatatatatgtgtgtatatatatataatatatatatatgtgtatatatatataatatatatatatatgtgtatatatatatatatatatatgtatatatatatatatatatatatgtatatatatatatatatatatatgtatatatatatatatatatatatatgtaatatatatatatatatatatgtaatatatataaatatatatatatatatatatatatatatataaaaattagttatgtatggtggtgtataattgtaattttagttattatggaggttgaggtatgagaattgtttgaatttaggaggtggaggttgtagtgaatcgagattgagttattgtattttagtttgggtgatagggcgagatttcgttttaaaaaaaaaaaaagttagttatggtattagttattttttagaaagatggtggtgattgtaaggggttatgaaggggatattggtaattggttatattttgttttttatttattttttattttttgagatagagttttgttttgtggtttaggttggagtgtagtgatatgattatggtttattatagtttcgaatttttgggtttaagtgatttttttattttagttttttgagtagtttgaattataggtatgtatttataaatttagttaattaaaaattttattttttattttggttgggtatggtggtttacgtttgtaattttagtattttgggaaatcgaggtgggtggattatgaggttaggagttcgagattagtgtggttaatatggtaaaatttcgtttttattaaaaatataaaaaattagtcgggtgtggtggtatacgtttgtaattttagttatttgggagattgaggtagtagaattatttgaatttaggaggcggaggttatagtgaattgagattatgttattgtattttagtttgggtaatagagtaagattttgttttagaaaaaaatatatgtataattttagagacgggagtttaattatgatgtttaggttggttttaaattttcgagtttaagcgattttttcgttttggatttttaaagtgttagtattatatgtatgagttattgtatttggttattttttattttttgatttgggtgttggttatttgagtgtgtttattttgtggaaatttattgagttatatatttaagatttgttagttgttttgtatgaatggtgtattttaatgaaatgtttattattagtgataaaaagtttttttttgatgttatttttttttttaattatatttattttttttttttatagtaaaatttttggtcgggtatagtgatttatatttgtaatttcggtattttgggaggtcgaggttaggagtttaaaattagtttggttaatacggtgaaatattattttggtcgggtatggtggtttacgtttgtaattttagtattttgggaaatcgagatgggtggattatgaggttaggagtttaagattagtttggttaatatagtgaaattttatttttattaaaaatataaaaaattagtggtgcgtggtggtgggtatttgtaattttagttatttgggaggttgaggtaagagaattgtttgaatttgggaagcggtggttgaagtgagtggagatggtattattgtattttagtttgggtgatagtgcgagatttttttttaaaaaaaaaaaaaaaaaagaaaagaaagttttatttttattaaaaatataaa

SEQ ID NO: 11 - DNA, 5310 bp, Artificial Sequence
  chemically treated genomic DNA (Homo sapiens)
aaaaaaaaaaaaaaaaaaattagaaaattaaaaaattaggtcgggtgtagtggtttatgtttgtaattttagtattttgggaggtcgaggtgggtagattatttgaggttaggagtttaagattagtttggttaataaggtaaaattttatttttattaaaaatataaaaattagttgggcgtggtggtattcgtttgtggttttagttatttaggaggttgaggcgggagaatcgtttgaatttaggaggcggaggttgtagtgattttagatcgtattattgtattttaatttgggcgatatagcgagattttattttaaaaaaaaaaaaaaaaattagttaggcgtgatggtatatatttttatttttaattatttgggagggtgaggtgggaggatcgtatttgagtttgataggttgaggttgtagtgagttgtgattatgttattgtattgtatttttgttggggtgatagtaagattttgttttaaaaaaaaaaaaaaaaaaagtttgattgttttagatttattttataatgattaatttgaattaagtcgttttattttttgtttggataattgtaatggagtttttattagtttttttgttttttttgttttttataatttttttaatattatttttttgtttaaaattaatagtggttgttttttttggttttttaagtaggggttaaagtttttataatggtttatatgttttataaggtgtgattttggtttttttatattttgatttattttttatttgttttttttattttagttatattggtttttttgttgttttaagtaatttattgtttcggggtttttgttttgttttttttgtttggaatgttttttttaaagcgtggtttttttattttttttaagtttttgttttaatgttattttatgagtaaggtttttgggtttttttgtttgtttttcgagtttttattattttttgtttttttgtgttttgttttgagtttggggagaatgatttttttagaaagtaatttgggtttttttgttttaggtttttgagtgggtttggtgaatgggaggtgttattaggagatgaaaggtaagaggggagagatgttggggtattttttttttttgtattttttttgttttgttttgggtagtggttgtgtttttttcgattatagttgtatttgggaatggattttatatttttttgtttttttatttacggatttttaataatatgattttttttttgatttttagtttttaaagtagttatgttttttagtttttgtttgtttttttggtgttttaatatttttgttgtttgggttttttgaattttgtttatttttttcgttttttttttaagatttgaatttttcggttgggcgtagtttttaacgtttgtaattttagtattttgggagatcgaggcgggtagattgtttgaggttaggagtttgagattagttcggttaatatggtgaaattttgttttaattaaaaatataaaaattagttggggatggtggtaggtatttgtagttttagttattcgggaggttgaggtaagagaatcgtttgaattcgtgaggcggaggttgtagtgagtcgagatttcgttattgtattttagtttgggtatggtagcgagatgttttaaaaaaaaaaaaaaaagtgtagttgttatggaaaatagtatggtgtttttttaaaaaataaagtaggttggagtgtagtggtgtgattatagtttattgtagttttaattttttgggtttaagttattttttcgttttagttttttgagtagttgggattataggttcgtgttagtaagtttggttaatttttttttttgtattttttgtagagataggggtttcgttgtgttgtttaggttggtgttaaatttttgggtttatttatttattttagttttttaaatgggattataggcgtgaattattgtttattgcgtcgggtttttttgtttttgtttttgtatacggtatatgttattatttaatatattatatttttacgtatttttttatttttttttattttttatattttggatggtaagttcgaaggcgtagggatgtttgtttattgttgtattttaagtggttggtatatcgtcggttgttagtaaatgtttttgaaatgaatgaatgagtgaatgatcgataaggggagttaaggggaaggtagcggtgcggttcgcgtcgtaggtagaagagttgattttttaattttcgttttttttttcgttttcgttcggaatgttgagtgttcgagaaggaggcggaaatgagcgcgtttaatagtttattagtcgggtgtttatttaattagggtttgtatttcgaggttcgtttgtgtttaatcgttcgtttaatggtttcgtttggtttcgggcgggcgcgggggaatttgcgaggcgagcgtaggtttggttattttgtttcgtcgggggtttattttattgcgtcgcgcgggtgcgcgtagatttgattttttttcgggtataaaaagcgttttgcgggagatttaggtcgggagggcgcggagtttagcgagtagttttaggtttttttaatcgcgtggtttatttttagttttagttttagttttagttgttgggtttattcgtcggttaagggaatgttttcgagatattagatgttagttgttcgttgtatttttagttatgaaattggaggattataacgttttttatttttttaatttaggggatgtggggatgttagaaagagagacggttcgttagatatttgagagtaataatattaggtagtatttgggtatttgttgtgtgttagatatgatgtttagcgttttaaattttttaatttatttaatatttatttatgagagggtaaaatattaagattataatagttttatttgatagatgtagaattgaggtttagggggtttattttattttttcgaggttttagcgttattaaggggtgggatttggatttgaatttaggtggggtcggttttaagggtttatgttaggtttgagagagtaagatttttattttcgtaacgtaagtaatttatggtttagttataggtttggcggggaggaggacggatagattattaggttagttttggaaggttaaagaatttgttatttaaaattttaggttgggtttcgttttttacgtttgtaattttagtattttaggaggttaagggaagcggattatttgaggtcgggagttcgagattagtttggttaatatagcgaaatttcgtttttattaaaaatataaaaattagtttggtgtggtagtgggcgtttgtagttttagttattcgggaggttgaggtaggagagtcgtttgaatttgggaggcggaggttgtagtgagtagagatgacgttatcgtattggacgatagtgagattttattttaaaaaaataaataaaataaaaaaatttttttagtttttagttcgttttttaaatttttaaatttgagttggggacggggagggagaaggattaggaggtggtatttagggttttttaaggtagtagtagaaggtgaaggaggagtgaggggataggtgagagagattgatcgggaaagtttagtttcgtggggaagggtttgtggggtagtgattgagatttaggatcgtttttatggttagagtttatttgtgtgtagtaagaggaaagtatttcgtgtttaacgtagtggaatgagagtaacgtagaagaataacgaattttaggtttggcgtttattttttaggaagggtgtgggagagttgttttttaagggagattttttggaggttgttttgcgtagtaagtagtttttatttagattatatatagtattttagattaattttaaaatttttgcgttttaaaaattgtttttatttatattttatagaaagttgagaaagtgttatttatatggggggtaggggtgttggagattatgagattaataataatttttttagttcgtattttttggtattattatagtttttaaattttgggattttttcgattagtttttttttgtttagttgtgaaatggaagaagcggttcgggtgtggcggtttatgtttgtaatttgagtattttgggaggcggaggatcgtttgagtttagaagtttaagattagtttgggtaatatagggtgattttttatttttttttcgttttattatatcgttataaaaaatttttaaaaattagtcgggtgtggtggcgtaagtttgtagttttagcgggagttgagggaggagaatcgttttagttcgggaggtcgaggttgtagtgagtcgagatcgcgttattgtatttttgggcgatagagcgagattttgtttttaaaaaaaaaaaaaaaagaaaaaagaggaagttgtatttaatttagaaacgcggtttttcgggatttgttagttttatatttcggaggatttttttcggcgggttggtacgggaggtggagaaagaggtttgggcggtttcgttgtagtcgcgtgtgggaggacgtacgggtttgttttaaagttttgggataatagcgttttcgggggataatgaatgcggagttttcgtttttagtcgattttagatgtgtttttattttttttcgttgtagtcgtaaggtaaggaaatattttttttttcgtattgaggaggttgaggagtgtattgggtgttttttttttttttaatttagaattgcgagatagaggttgagtttttgtaaagaatagttttagaaaagttaggagagcgtaggagggtattcgggaggttaggaggggttcgttggggttttaatcgtatttatatcggttttatttgcgagggggcgggatttcgtggcgttggattaattagtatttatttgcgtttatttggttttttttcgttggttttcgggggttgcggtgtttaaaggggtaagagttgagcggaatatcggttcgtcgtcgcggtagttgttttatttttttttttgtagttatggggttttttcgtggatttttcgcgttttttttttttttttaggtattttatagtttcgtcgtggtttcgatcgggatcgttttttggggggcgggcggggttcgtatggggtagtggcgtcggggagagcgcggggttgcgttttttggggttaagggagtttcggaaggttcgtgaggattttgcggtgtggggagtgtagggtcgggtacgtttggatttagttttttttattttttgttttcgggcgtagg

SEQ ID NO: 12 - DNA, 5310 bp, Artificial Sequence
  chemically treated genomic DNA (Homo sapiens)
tttgcgttcgagggtagagagtgaaggaggttgggtttaggcgtgttcggttttgtattttttatatcgtagggtttttacgggtttttcgggatttttttggttttagggagcgtagtttcgcgtttttttcgacgttattgttttatgcggatttcgttcgttttttagggagcggtttcggtcggggttacggcgaggttgtggagtatttggagaaggaggagagacgcgagaggtttacgagggagttttatggttgtagagagaggggtgaagtagttgtcgcgacggcgggtcggtgtttcgtttagtttttgtttttttgagtatcgtagttttcgggagttagcgggaggaggttaggtgagcgtaggtgggtgttgattggtttagcgttacgaggtttcgttttttcgtaggtgggatcgatgtgggtgcggttgaggttttagcgaattttttttggtttttcggatgtttttttgcgtttttttggtttttttggagttgttttttatagggatttagtttttgtttcgtagttttgggttagaggagaaaagaatatttagtgtattttttagtttttttagtacgggaagagaaatgtttttttgttttgcggttatagcggaaaaaagtggagatatatttgaagtcgattgaaaacggaggtttcgtatttattatttttcggaggcgttgttattttaaagttttgaagtaggttcgtgcgtttttttatacgcggttatagcggggtcgtttaagtttttttttttatttttcgtgttagttcgtcggggaggatttttcggggtataaaattagtaggtttcgaaggatcgcgtttttgaattggatataattttttttttttttttttttttttttttttggagatagggtttcgttttgtcgtttaggagtgtagtagcgcgatttcggtttattatagtttcgatttttcgggttgaagcgattttttttttttagttttcgttgagattataggtttgcgttattatattcggttaatttttaaaaattttttgtagcgatgtggtggggcggggggagggtggagggttattttatgttgtttaagttggttttgaatttttggatttaagcgatttttcgttttttagagtgtttaggttataggtatgagtcgttatattcggatcgttttttttattttatagttaaataaagggaagttagtcgagaaagttttagagtttggaagttgtagtggtgttaaagggtgcgagttaagagggttgttattagttttataatttttagtatttttattttttatataaataatatttttttaattttttgtaaaatgtaaataaagataatttttaaaacgtagaggttttgaaattggtttgaaatattgtatataatttgggtaaaaattgtttgttgcgtaaagtagtttttagagagttttttttggaaaatagtttttttatattttttttaggagataaacgttagatttgggattcgttgtttttttacgttatttttattttattacgttagatacgaagtgttttttttttgttgtatataagtgggttttggttatgaaaacggttttgagttttaattattattttataagtttttttttacggagttgagttttttcggttagttttttttatttgtttttttattttttttttattttttgttgttgttttgagaagttttggatgttattttttggttttttttttttttcgtttttagtttagatttaggggtttgaggaacggattggagattggagaggtttttttgttttgtttgtttttttgagatggagttttattgtcgtttagtacggtggcgttatttttgtttattgtaattttcgttttttaggtttaagcgatttttttgttttagtttttcgagtagttgggattataggcgtttattattatattaggttaatttttgtatttttagtagagacgggatttcgttatattggttaggttggtttcgaattttcgattttaagtgattcgttttttttggttttttaaagtgttgggattataggcgtgagaaacggggtttagtttggagttttaaatgatagattttttgattttttagggttaatttggtaatttattcgttttttttttcgttaggtttgtggttaagttatggattgtttgcgttgcgagggtgggggttttgtttttttaggtttagtatgggtttttaaggtcggttttatttgggtttaaatttaggttttattttttagtagcgttgaagtttcggggaagtaaaataaattttttgggttttagttttgtatttgttaaatggggttgttatgattttagtattttatttttttatagatgagtattaaataaattagaaggtttaaaacgttaaatattatatttggtatatagtaagtgtttaaatgttgtttggtattattgtttttagatgtttggcgagtcgtttttttttttagtatttttatattttttgaattaagagaatgagaagcgttgtaattttttaattttatggttgagggtataacgagtaattggtatttggtatttcgggagtatttttttagtcggcgggtgagtttagtagttggggttgggattgaggttgggggtggattacgcggttgggaaagtttggggttgttcgttgagtttcgcgttttttcggtttggatttttcgtagggcgttttttatgttcgaggggaggttaggtttacgcgtattcgcgcggcgtaatggagtgggttttcggcgggatagggtggttaggtttacgttcgtttcgtaggttttttcgcgttcgttcggagttagacgaagttattaggcggacggttaaatataaacgagtttcgggatgtaggttttaattaagtaaatattcggttggtgggttgttgagcgcgtttattttcgtttttttttcgggtatttagtatttcggacgggggcggagagaggagcggagattggagagttagtttttttgtttgcgacgcggatcgtatcgttgttttttttttagttttttttgtcggttatttatttatttatttattttaaaaatatttgttgatagtcggcgatgtgttaattatttaagatataatagtgaataaatatttttgcgttttcggatttgttatttagagtgtggagggtagaggaaagtgaaaaaatacgtggaaatataatatgttagatggtaatatgtatcgtgtataagaataaggataggggggttcggcgtagtgggtagtggtttacgtttgtaattttatttagaaggttgaggtgggtggatgagtttaggagtttgatattagtttgggtaatatagcgagatttttgtttttataaaaaatataaaaaaaaaaattagttaggtttgttggtacgggtttgtagttttagttatttagaaggttaaggcgggaggatagtttgagtttaggaggttgaggttgtagtgaattatgattatattattgtattttagtttgttttattttttgaggaaatattatattgttttttatagtaattgtatttttttttttttttttgagatatttcgttgttatgtttaggttggagtgtaatggcgagatttcggtttattgtaattttcgttttacgggtttaagcgatttttttgttttagtttttcgagtagttgggattataggtgtttgttattatttttagttaatttttgtatttttagttgaggtagggttttattatgttggtcgggttgattttaaatttttgattttaggtaatttgttcgtttcgattttttaaagtgttgggattataggcgttagagattgcgtttagtcgggaggtttaagttttaaggaagggacgagagaaatgggtagggtttagggagtttagataataggggtgttgaggtattagagagataaataaaagttggaaggtatgattattttgagaattgaaggttagagaggaaattatgttattggaagttcgtggataaggggatagggaagtgtgggatttatttttaaatgtagttgtgatcgaggaaggtatagttattgtttagagtagagtagagaaagtgtagggaaaaaaaatattttagtatttttttttttttgttttttattttttggtggtattttttatttattaaatttatttagaagtttgaggtaagaaagtttaggttgttttttagaggggttattttttttaggtttaggatagggtatagaagggtagaaaatgatgggaattcggagagtaaataagaaagtttagaggttttatttataaagtggtattagaataaagatttgaaggaagtgaaggaattacgttttggaaagagtattttaggtagagaaaatagggtagaggtttcgagatagtagattatttggaatagtaagaaagttagtgtggttggagtagagagagtaagtaggaagtgagttagagtatgggagggttaggattatattttgtagagtatgtaggttattgtaagaattttggtttttatttggggaattaggggaggtagttattgttggttttgagtagaggagtgatgttgagaaaattataagggataagggaagtagggaggttggtgggggttttattgtagttatttaggtaaaagatgaaacggtttggtttagattggttattatggagtgggtttgaaatagttagattttttttttttttttttttgagatagggttttgttgttattttagtaggggtgtagtgtagtggtatgattatagtttattgtagttttaatttgttaggtttaagtgcgatttttttattttatttttttaagtagttggaaataaaggtgtgtgttattacgtttggttaatttttttttttttttttgagatggagtttcgttgtgtcgtttaggttagggtgtagtggtgcgatttgggattattgtaattttcgttttttaggtttaagcgattttttcgttttagttttttgagtagttggggttataggcgggtgttattacgtttagttaatttttgtatttttaatggagatggggttttgttttgttggttaggttggttttgaatttttgattttaggtgatttgtttatttcgattttttaaagtgttgggattataggtataagttattgtattcggtttaattttttaattttttaattttttttttttttttttt

SEQ ID NO: 13 - DNA, 7040 bp, Artificial Sequence
  chemically treated genomic DNA (Homo sapiens)
atatagtttggtttgagggaagatgttagtatgtgattataaattggataaaattatttaagatagtcgtattttaattagattaaattttaaaattttaaatatttataagtattttatgtttttaaaaatatgagaaatttgtaagatattattaaatttaaaggtttttaaaattagtttgaaatatatttgtatgttttaaaattttttgtgaagtttagttgtatttagataagtaaaattttatttacgtatttttagagttaaaatataaaatttaagcgattagggtaaagtggaagtaattaattttaattttttcgtatggaaatagatagtgtgcgttggttatatttagggacgtgttttatgtaatttataaattaagatttgtttcgattatattatatggattatataaaaattaaagtagttgtatatgtattttattgatatagaaataagtttatgttatattgttaagtataaaatttaaattttagaatgttaatagtataattttattgaagtaaaaaaaaattgatatgttttttaagtttgagtttataatttttgtatgggaatttttagtaaagcgtatatatttatttatagtttaattttttagttttaaaaaaggtaaaagtgaaatttcgataatgaaatttacggttgtaattagtaatattatatttgtacggttgtaatattcgcgtttttcgtattgtaatttttggaatttattgtaatttttcgaattcgttgttattcgagattttttaatttggcggttttttgttaggattcgggcggtcgttaagagtgcgtaggcgtaagcgcggtcgtcgtcggtggggttttatgtgttgttgagattgttgttgagtttttgggtttttttaagattgttttttaaaagacgacgtgatgattttaaagagaaaggaaaatttgttgcgtacgtagaagggtaggttgggcgtattttgagcgtttttcggggatcgacggtttcgtttacgtgttttcgggtattagcgcgtttaaagttcgtgtattaggaaacgtataaaagtattagcgggcgagttcgagggcgagtttacgggtagttaggaggcggcgagggcggtttgttttttagagattggggaattaagaaaggtagagttattttttcggttttagcgtagtaagtgtaggaggtagggagggcgtagcgtttcgtcgtttacggtattcgtggaattcggtgcgcgtttcgggagttggggcggtttaggtttagcgtgtttagaaagttaattacgttggttaggaggacgtttttttattattcgcgatttttaggttttgattaaagttaaattaaaaggagttattcgtttcggtatttgttgttatttttgtgataaatatggtgtttgatacgaaagtattttaatagttatgttgttaattaaagaataaaatacgtaaagtttgtgcgttaagaatacgagagtatttcgttttttaggaggtgtagtttattttgttttttttgttttatatataattttaaggagaattttttgttattaatatattttgttttttgtttttgggggatgatataggtatattgtatttgattagattagtgttaattttttatttacgtttttattatatgttgtattattaatatagtaggattttatatttttaatcgtaaaatttaagagtagaaaaatatttaaattgtatgttagtttaatatgaaaacgagttattttagttttgataggatatttttaaattaatattatttaataaatatgttttttattcgtataagtttatatatatggttttttaaatgagttttataaataataattagtattgaggttttgatttaagtatttgaaattttgttattttttataataattttgagatgggtatattttttttattttgtagataaggaaataggtattgggatggtaagaaatttaggttatttggtttttaatagttttttattattatgttaaagttttatttatttttgagatttaaaatattatatagtgtatatatatttggtaattaaattaggattaaatattaaagttaagggttaagtatagtgttttgtaattttagtattttgggaagttgaggcgggtagatcgtttgattttaggagtttaagattagtttggaaaatatggtgaaattttattttaataaaaaaatataaaaatagttgggtgtggtggtgtgtgtttgtggttttagttatttgggaggttgaggtgggaggatcgtttgagttaaggaggtagaggttgtagtgaattaagattatattattgtattttagtttgggtgatatagtgagacgttgttttaaaaagaaaaaagtaaaattaaagtaagaatataataagaaatatgtttggtattgtgttacggggagaaaaaattaatagggagataaattttgtttttagggtaagtgtaatttgttgagtaaaagaaatattttaagatattttaaaaaagaaaataaaggttgttgtaaattggatatttaattaaatatttttgggtagattggtagatgatagatttaatgaatttggggtttataaatatatagaatgttatatttttattaatattttatgttttgggtaaagagtaaaattaattttgaaaatgaattgtgtatgtaattattttaaaaataaagattatataataagttatattattttgtattatgtgtaatatttagggggttaaggtatttttattttgttaatatttatagtatttttattatataattattttagagttttgaattataattttaattaggtgatagttattgagtaaattttgtaatgtaaatttattatagaatataattgtattattttttttttatttattggtatttttttatatttggggtttgatataattgtatataataatttttttattaaaatattttatagagttggttaggtatggtggtttacgtttgtaattttagtattttgggaggttgaggtaggtggattatttggggttaggagtttgagattagtttggttaatatggtgaaattttatttttattaaaaatataaaagttagttgggtatggtggtatgcgtttgtaattttagttattcgggaggttgaggcgggagaatcgtttgaatttaggtggcggaggttgtagtgagcggagatcgtgttattgtattttagtttgggtaataagagcgaaattttgttttaaaaaaaaaaaaaagattgaggtttaagtaggttaaatattatatatatattagattatatattaagttatataggttgtatagaatagaaattttattttagggttttatagattttaaattgtttttgtaaatggtttatgtttattaatttatttttttaaagttaatatattttaaaaatagaattgttattattaaaatgtggttatatataatttaatatataagtgttttagaagaagggaattttattatttgattttttaaaatatagattttaatatttttgtgtgtgtgtgtttttttatgaatatggtaatattattggttttttttttaaagatatggtatgaaattaattttttgtttagagttaggattttgttttattatttagtttggtgtgtagtggtacgattatagtttattatagttttaaattttttagtttaagttttttttcgttttagtttttaaagtagttaggattataggagtgtattattatatttagttaattttattattattttttgtagaggtaggttttaaatttttggttttaagtggtttttttattttagttttttaaagtattggtattataggtataatttattgtatttggtagaaaattaatttttattataaaaattagaaagaaagattttattgtttgatggttaatattttgaattttattttaatttttggttttttatattatatgtaggtattagtgattttgtgttatttttatttttttagatttttttttttttataatttttttatatgtgttattatttgaagttttgattatagttttgaattatttttatttttttgttttttttaattttggtttaaaatttcggtaatttatttgttacgaagtttagaattttttttgtaagtgagttgatcggttgggttaaatcgttttggaagggaaggattgttaggaagttagtatgttgttaagatgttttgttaatttgttgtgtaagttgtatagagtgttaggggatttttttttttattgatgaatttaggtgtgtgttatgatttgtattagtgattttatttggattgattaaggttgtaattttttatttatatgaatgttgtatttagtttttttttgtaattggttaaataaatgtttgttgtttgtattttaatttttagttaatatttgttggaagtgatttaatgtagttggagaatgatattaataattattatagtttgtaaagtgtgaaataattttattgtgttttgtggtttttttagtttgaggattgataatgtgtagcggatgagatttgaaaaaaacgtattttattataatttaagaaataatgtaaaagaggggtgagttttgaggtagttttatgttgtttgtttggtatgagtttgtttttataagaatttattttaagtgtggaagggaaatgtttttatttgaaagggatagttgtgttttatttcggtttttttttttatttgataaaaatttttgttgagtgatagtatagatgtagtttatttggaataagtgaaggaaaaggagaaaagggatgaggtggagcgaaggagtagttagttatgtttttaaagtttcgcggttttttttagtttttttatttaatttagcggttttggtgtttttttgtaaagtgagatgttttcgtttttggttttacgtttttattttcggagcgagttttttttatcggtggacgcgcggttttgtagtagttttttagagttatttgcgaagttgtttttgggggttatttttttcgggtttcgcggttgtcgcgtcggttggtttggtgttttattgattgggagtaggtgtgtttgttgtagaggttgggagttggagggtttggttcggtgtataaggcgatttatcgcggtgtttttgtggttataaagtaagtgaataagtgtattaagaatcgattagtatttcggcggagtttttgggttgagtttaacgtagtaaggttgcgttacgataatatcgtgcgcgtggtggttgttagtacgcgtacgttcgtagggtttaatagtttagggattattattatggagttcggtggtaacgttattttatattaagttatttatggcgtcgtcggttattttgagggggacgtaggggagttttattgtcgtattggaggatagttaagtttgggaaagtgttttaagtatttattagatgttgtgaacggtttgttttttttttattcgtaaagtattgtgtatttggatttgaagttcgcgaatattttgattagtgagtaggatgtttgtaaaattagtgatttcggttgttttgagaagttggaagatttgttgtgtttttagatatttttttattttttaggaggtatatatatttatcgcgtttcggagtttttgaaaggagagggcgtgacgtttaaagtcgatatttatttttttgttattattttttggtaaatgattattaagtaggcgtcgtattcgggggagcggtagtatatattgtacgcggtggtggtttacgatttgcgttcgttttttttcgttgtcgttttcgaggattcgtttttcgggtagcgttttggggacgttatttagcgttgttggagatttagcgcggcgtagaggtcgagcgcgcggttgtttttggtggattttatttttttgaaagttgaattcggttgattgaaaatttggttaagataagtttttgtttgattttatttgtttttaaaggaagtggagatgtcgaagaaaatatatttgtaggatggagttttagaaaataaagttattaaaaatttttttagtttttagtgttttttttaggatatattagtaaagttataagtttagtatttgttgttttagtattgttagtaattaattttatttatatagttatgtgttttgttttttattgttagtattttatttatttaaatttgttattgataaaagtttgtttaaaatagaattttattgtagaaatgttaaaattttttataaatttatatatattttatatttattatataaattttaattattaatggtgtagttgtttttatattaaattagtaaaaatttttaaaaaaataagtaatgtttttttattattttttttagtaaaattttttgtttgtaatgatttttatttataaaagttatatattgaggtatatttatatttaaaggaattatattataaatgatttattgtaatatttttaatttgtgtattgtaatgagtagaaatattttgttaaaatatttttaaattgggttatttttatttggtattgggatttagaagtagaagataaagattatatgatgtgagaggaaaatgtaggagtagaaggtaaagattatatgatgttaggaattatgaaatttaatatttggatggaagagaatagataaatagaattagattgtttattttagatattaaaataatggatgttggtatataggatttaaaggagaaggtgattggattttgttattgggatagttttgatttttttttagtaatagtagtttttgtgtatggtggaaagtaaggttgatgtaatggttggtagagggaatggtaaggttttgaagtagaggttgtgtatgtattgttaaggagggagaggtaggaagtttaaaagggggttagagatatagaaatgtt

SEQ ID NO: 14 - DNA, 7040 bp, Artificial Sequence
  chemically treated genomic DNA (Homo sapiens)
aatatttttgtgtttttgatttttttttaagttttttgtttttttttttttaatagtgtatgtatagtttttgttttagggttttgttattttttttgttagttattgtattagttttgttttttattatgtatagaaattgttattgttaaaagaaagttaaagttgttttaatgataaaatttaattatttttttttttaaattttatgtattaatatttattgttttgatgtttagagtgggtaatttagttttatttgtttgtttttttttatttaaatgttaaattttatgatttttgatattatataatttttattttttatttttatattttttttttatattatataatttttattttttatttttgagttttaatattaggtaaaaatgatttagtttagaagtgttttagtaaaatgtttttatttattgtaatgtataagttaaagatattataataagttatttatgatataatttttttgaatgtaaatgtattttagtgtatgatttttatgagtgaaggttattataaataagaagttttattggggggagtagtaggaaagtattatttatttttttaaaagtttttattgatttggtgtgggagtaattatattattaatagttggaatttatgtggtaggtatgggatatatatggatttatagaaaattttgatatttttgtagtggagttttattttggataaatttttattaataataaatttaaataaatgaaatattagtaatggaaagtaaagtatatgattatatgaataagattagttattaatagtattgagataataggtattagatttgtagttttgttaatgtgttttagaaaaagtattggagattaaaggagtttttagtaattttattttttaaaattttattttataaatatgtttttttcgatatttttattttttttaaaaataaatagaattagataaaaatttattttgattaggtttttagttagtcgagtttagtttttaaagaggtgagatttattaaaagtagtcgcgcgttcggtttttgcgtcgcgttgggtttttagtagcgttggatgacgtttttaaggcgttgttcggggagcgagttttcgaaaacggtagcggagagggacgggcgtaggtcgtaggttattatcgcgtatagtatgtgttgtcgttttttcgaatacggcgtttgtttggtagttatttgttagagagtgatggtaaaggaataaatgtcggttttaggcgttacgttttttttttttaggagtttcggggcgcggtgggtgtatgtgttttttagagggtaagagggtgtttggaagtatagtagattttttaattttttagagtaatcgaagttattaattttatagatattttgtttattgattaagatgttcgcgggttttaggtttaagtgtataatgttttgcgagtggaggaagagtaggtcgtttataatatttagtgagtatttgagatatttttttaaatttaattgttttttagtgcggtagtgaggtttttttgcgttttttttagggtggtcggcggcgttatagatgatttggtgtaaagtgacgttgttatcgaattttatgatgatggtttttaggttattggattttgcgggcgtgcgcgtgttggtagttattacgcgtacgatgttatcgtggcgtagttttgttacgttgagtttagtttagaaatttcgtcgagatgttagtcggtttttggtgtatttgtttatttgttttatggttataggaatatcgcggtaagtcgttttgtatatcgagttaaattttttagtttttagtttttgtagtaagtatatttgtttttagttaatggagtattaggttagtcggcgcggtagtcgcggggttcgaggaagatggtttttagaagtagtttcgtaggtagttttgagggattgttgtagggtcgcgcgtttatcgatggggaaaattcgtttcggaggtaggggcgtagggttaggggcgagggtattttattttgtagggggatattagggtcgttggattgaatgaagagattaggggaaatcgcgggattttggaaatatgattgattattttttcgttttattttatttttttttttttttttttttatttgttttaaatgagttatatttgtgttgttatttagtaagagtttttattagatggagggagaaatcggaatgaagtatagttattttttttagatgaaagtattttttttttatatttgaagtgaatttttataaaaataagtttatgttagataaatagtatggagttgttttagaatttattttttttttatattattttttaaattataataaaatacgttttttttaagttttattcgttgtatattattagtttttagattaaagagattataaagtataatgaaattgttttatattttgtaggttgtaatgattgttagtgttattttttagttgtattaaattatttttagtaggtattggttaagagttaaaatgtaaatagtagatatttgtttaattaattatagggaaaaattaggtgtaatatttatatggataaaaaattgtaattttaattaatttaaatagaattattgatataggttataatatatatttaaatttattagtggaaaggagaattttttgatattttatgtagtttatatagtaaattagtaagatattttagtaatatattgattttttaataattttttttttttaaggcgatttggtttaatcggttagtttatttgtaagagagattttagatttcgtagtaaatgagttatcgaagttttgaattagagttgggggagataaaagaatagaaatgatttagagttgtgattagggttttaaataataatatatatgggagaattgtagaagaggaaaaatttgaagaaataaaaatggtataaaattattggtatttatatataatgtagaaaattagaagttggaatgaaatttagggtattggttattagataataagatttttttttttgatttttataatgaaaattaattttttattaagtgtagtgagttatgtttataatattagtgttttgggaggttaaggtggaagggttatttgaggttaagaatttgagatttgtttttataaaaaataataataaagttagttgagtgtggtggtgtatttttatagttttagttattttggaggttggggcgggaggagatttgaattgaggagtttgaggttatagtgagttatgatcgtgttattgtatattaggttggatgatggagtaagattttgattttaagtaaaaaattaattttatattatatttttggaaaaaggattaataatattattatatttatgagaaaatatatatatataaaagtgttaggatttatattttaaaaaattaaatggtaaagttttttttttttaaagtatttatgtgttaggttatgtgtaattatattttaatgatagtagttttgtttttgaagtatattgattttgagaaggtaaattaataaatatgaattatttatagaaataatttgaggtttgtgaagttttggaataggatttttattttatataatttgtgtggtttagtatgtgatttagtgtgtgtataatatttaatttgtttgagttttaattttttttttttttttgagatagagtttcgtttttgttgtttaggttggagtgtaatggtacgattttcgtttattgtaattttcgttatttgggtttaagcgattttttcgttttagtttttcgagtagttgggattataggcgtatgttattatgtttagttaatttttgtatttttagtagagatggggttttattatgttggttaggttggttttaaatttttgattttaggtgatttatttgttttagttttttaaagtgttaggattataggcgtgagttattatgtttggttaattttatggaatattttagtagaaagattgttgtgtgtaattgtgttaaattttaaatataaaaggatgttaatgaatagagaaaaagtaatataattatattttataataaatttatattgtaaaatttatttagtaattgttatttagttaggattataatttagggttttgaaatggttatataataggagtgttgtgaatattagtagaatgagagtgttttaattttttagatattatatataatgtaagataatgtgatttattatataatttttatttttaagataattgtatatataatttatttttaaagttggttttattttttatttaaaatataaggtattagtgaaaatgtggtattttgtgtatttataaattttaagtttattagatttattatttgttaatttgtttaagaatatttaattgaatatttaatttataatagtttttgtttttttttttaaggtattttaaaatattttttttatttagtaaattgtatttattttgaaagtaggatttatttttttattgatttttttttttcgtaatatagtgttaaatatattttttattatgtttttattttaattttgtttttttttttttgagatagcgttttattatgttatttaggttggagtgtagtggtgtgattttggtttattgtaatttttgtttttttggtttaagcgatttttttattttagttttttaagtagttgggattataggtatatattattatatttaattatttttgtatttttttgttgagatggggttttattatgttttttaggttggttttgaatttttgaggttaagcgatttgttcgttttagttttttaaaatgttaggattatagggtattgtgtttggtttttaattttaatgtttaattttgatttggttattaaatatgtgtgtattatgtaatattttggattttaaaaatgggtaaagttttagtatggtggtaaaaggttattaggggttagatggtttgggttttttattattttagtgtttgtttttttatttgtaaaatgaggaaaatatgtttattttaggattgttgtgaagagtaatagagttttaaatatttagattagggttttaatgttaattattatttataaaatttatttaaaaaattatgtgtatgggtttatacgaataagaaatatatttgttaggtagtattggtttaaaagtattttattagggttgaaataattcgtttttatgttaaattaatatataatttgagtatttttttgtttttgaattttgcggttaaaggtataaaattttgttgtattaatggtatagtatgtagtaaaaacgtgggtggaaggttaatattaatttgattaaatgtaatatgtttatgttattttttaaaggtaaagagtaaaatgtgttgataataaggaattttttttggaattatatatgaaataaaggagataagataaattgtattttttgaggagcgaaatgttttcgtgtttttagcgtataggttttacgtgttttgttttttgattggtagtatgattattaagatattttcgtattaaatattatatttattataagagtaataatagatatcggaacggatagttttttttaatttgattttaattagagtttgaggatcgcggatagtgggagaacgtttttttgattaacgtggttggttttttgggtacgttgggtttgagtcgttttagttttcggggcgcgtatcgggttttacgggtatcgtggacggcggggcgttgcgttttttttgttttttgtatttgttgcgttggggtcgaggaggtggttttgttttttttgattttttagtttttggaagataagtcgttttcgtcgttttttggttattcgtgggttcgttttcgggttcgttcgttggtgtttttgtgcgttttttagtgtacgggttttgggcgcgttggtgttcggaagtacgtgggcgaggtcgtcggttttcgaaagacgtttagagtgcgtttagtttgtttttttgcgtacgtaataaatttttttttttttttagagttattacgtcgttttttggaaggtagttttaaaaaggtttagaagtttaatagtagttttaatagtatataaaattttatcgacggcggtcgcgtttgcgtttgcgtatttttgacggtcgttcgagttttggtaggggatcgttaggttaagagatttcgggtgatagcggattcgagaggttatagtggattttagaggttatagtgcgaagagcgcgagtattgtaatcgtgtaagtgtggtattgttggttataatcgtggattttattgtcgaaattttatttttgttttttttaagattaaaaagttaagttgtagatgaatatatacgttttattaaaaatttttatataaagattatagatttaaatttgaaaaatatattaatttttttttattttagtgggattatattattgatattttaaaatttgaattttatatttagtaatataatatagatttgtttttatgttagtaaagtatatatatagttattttaatttttatatggtttatataatatggtcggggtagattttagtttgtggattgtatggagtacgtttttggatgtgattagcgtatattatttgtttttatgcggggaggttggggttggttgtttttattttgttttgatcgtttgggttttgtattttgattttggagatacgtaaataaaattttatttgtttaaatatagttaaattttataaaaggttttaagatatataaatgtgttttaaattggttttggaaatttttgaatttaatgatattttgtaagttttttatgtttttaagaatataaaatgtttatagatatttgaaattttgaaatttgatttgattaaaatgcggttgttttgaatgattttgtttaatttatgattatatattggtatttttttttaagttagattatgt

SEQ ID NO: 15 - DNA, 5942 bp, Artificial Sequence
  chemically treated genomic DNA (Homo sapiens)
taaggattaggattttaatataaatttagttttttattttttcgggttttttatgtttttttaaattcggtcgttttttatagttttttgtttttgggtttttttttatattttttattatttttttatttcgtatttaagattttatgaaaggtttttttagaaaagaaaaaatgaggagttttgcgatttgaatagtttttttttgttcgtttgtaaatttgaatttttggattttataatagtgagttttttttgtgtttattattcggtatgagtaagataagggggtgggtggtgggagagtggggaagtgtgggaaagaaaagtgtagataaatgggtggaataaagaagtttgatttaaagtttagatttgggggttagagttttggttttagtttaattaagtgtataagtttgataatcgtgggtttttttattatattggttttttttagtaaaattttatttatttttatttttagaggttttgattttttttattattttgtattataatatttgataatatgggtcgggagtggtggtttatgtttgtaattttagtattttgggaagtcgaggtcggcggattatttgaggtcgggagtttaagattagtttggttaatatggagaaatttcgtttttattaaaaatataaaattagttgggcgtggtggggtatgtttgtaattttagttattggggaggttgaggtaggagaattttttgaattcggggggtagaggttgtggtgagtcgagattatgttattgtattttagtttgggtaatgagagcgaaattgtattttaaaaaaaaaagaaaaaaattgataatatggtattttttttttttagttgtgaattttttgagggttgggaatgtttttatttgtatttttggtatatagtatatggatttatgtttgtgaaattagtgaattggttgtagttagggaattttttttgggggaagtgagatttgtacgaagttgggtaatttttggtttaggggggttgaaagaataggtgggggatttttaggagggtttgggatttgaaagtgaatttagattggtagggaggtgattttattatgttatttggagaggttgttttttttgatttaggtgggatttgtatgtggtttttaggtttttgtttggtttttttaaaatagtttttagaaaagtgaataaattataaatggttgatttatttttgatttttagttcgttttttacgaagatagagtttattgattaaaaattttaggatttgtatttgggtagattttaggaaggggaagttaaagggtttaggttagaggtttaagtttagattttagtagtagattagggttagattttattaaagttagaattcgaggtttatgtaagtttttagatttcgtttttaagttttgtttttttttttttttttttttttttttttttagtttagtgtggttattcgagggggttttttttttttagttatagttcgggtattttaagttgggaaatgtgttattcggggttggggtgttgatttgtagtttagttttttttggttttttttgaggatagtggggatgggattggtacggtttttatttcggggttttagttttatttttggtttttagtttttttttagtagtagtttgaagttcgggttggagatgggtattttaagtggaaggttgggaggttgaggattttgcgatagtgatagtaggtgagtagtggatgtgcggtggttggaattttggaagtgggtgttatagttttcgtagtattggagggagggagtaggagatttgtagagaaagaagaaaaagtattaagggtaggggaaggaaaaggggaagagttgaggttttagagggggttggtagggtagaataggatttttttagtttttttgttaaggaataaattgttagttaggtatagtggtttacgtttgtaattttaatattttgggaggtagaggcgggtagatggttttgagtttaggagtttgagattagtttgggtaaaatggtaacgtttgtttttttttttttttttttttgagatggagttttgttttgttgtttaggttggagtgtagtgttatgattttggtttattgtaatttttattttagcgatttttttgtattagttttttaagtagtcgggattataggtatatgttattatgtttcggtaaagtttgttttttataaaaaatatgtttgagtttaggaagcggaggttgtagtgagttgaaattatattattgtatattagtttgggcgatagagtgagatgagtgagattttgttttaaaaaaaaaaaaaaaaaaaaaaaaagggataaattgtttttttttttatttaatagtgagggatttaggttggtttaaaggtggtggtgagttatttgaattaattgtttatttagttatagattaaattttttattttatttttttttttttttttattattgtatttgatttgttttaaaaataaatttttttaaattattgtgggatttagagtagaatagttgaaagaaaaaaatggtaattagatttagtaaatttttgggtaaggggagggatattagttataatgattatagttaatatttatgtattgtatattatgcggtatgtattattttagtattttatatatattaatttattgaattttaataacgatttttattatttttatttttaagatgagaaaattggaatatgtagatattaggttgtttgtttaagtaagtggaattaggttttaaatttagggagtttatgtttataattatttgattatattattttgttaatttatatatgaggataaggaaagaattttttagtattgtgttggggcgtttggtgtggtgtggttgggagaggtagaatataatgagatatgggtttgagttaaagtttttttttatcggtttttcgggttttttgtttttttatggttttttttgattatgcgggttattttagggaagttagtttttttagcgagttgagtcgtatttttgttatttagtttatagatttttatttaggtagttttacggtttaggagatagtttatagttgttttttggttcgttcgagtagtatatattagtggggtttattagaaggtatttcgggcgttgatattttttttagttttttttgttttatgcggttttagtagttttttaagttttggtaggttttttttttgggttgtttttagtattcggtgagttattttatttttagttttaagggattttttttgtttatgtttttttgatgttttttttgttattgtttttgttgttggtgtttttattattttttttttttttttttttttttttttggtaggtttagtttgagatttttgggagttaggagcgttgtttttatttttaattagggttttatagaaagttcgggttgtagttttatttagggtggattttggtttttcgggttgtggttgttgttgtttatttttttagaggtcgttggggttagtggttggggtgaaggtgatgagtaagggtcgggatatggtttttgggagaattgagaaaatgatattaggtaagggaaggatgagataagtaagttaagttcgtggtgattttgtagtaattatagttttagagatttgttgggatgagaaaaagtagttaaaaatatttttttgttattaaagtaattttataatttaggattttgtagggtttaagggagagagattttgcgtaaaaatatggaattttataatatcgattttgttttttagtaaagattaataaaattttatgagattgttgtttagaggttttgcgttcggtttttatttttatttttattaataataaatattagtttttttttgaaattatttttttatttcgtaagatatattagtaggaaaaaaaaattagtttggttttttaagtttttcgcgattttatttcggagttttttttttttaaataaaaatagatgggttattttttagaagatttcggggagagttttttatacgtgttgttgtgtagttttcgtatcgtaaaatggcgttattttaattagaagagttgatataattaaatagttatacggtacgaagacgtatgcgtggcgataataataataaaaattataatttatattatttgagggttcgggcgtgcgtaaagtttcgggtttagtttttcgcgttggaatttttttaatagtaaacgagtaaagtttcgcgcgtttaggtggcgcgagtattaggatttgtcggttggggttttatttttatataacgtttttataatgtttttcgttttttttaacgtggttttcgttttaagtttattttttggagttaggaatttattttgtgggttaggaaaggtttttaggaggcggagggaaatttgtggaatgtcgagaagtcgtgtaatgaaataacgttacgtttgttttttattattattttgattagggttcgaaggttatatttagagtttaaggggaaatggagaagtgtaaagggacgagtagaatggttggtattattttaggttagcgtattgggacgttttagtttttatatcgtttattttattttatttaagtttttacgtacggagttaagtcgtatttttttttttatgaggtaggagttcggaggaaatagtatgttcgttaagggtttttggcgggattgattcgtattaggggtttaataggtaataaggatttagcggattggtcgaggataggttagttttttgggtagtagcgtcgcgtcgggattagaggggaacgtgaggagagttgcggaaagagatttagtttggttttttttttttttcgttttaagttagtttttttatttagtgagtataaaattgtattgtttagattttcgggtttcgaacgttatatttggttttcgttttcggtggtttttcgttgtgtttcgttcgtaagcgttttttttcgggttttcgtgatagttaggtcgtgcgcgggttattttgggattggtagttcgtttttttttatttagttagtttttttttttatcggggatttcgtgtttcggtatttatcgcggtatttgatttttggcgtttgcgtgttgtttttttttttattttttttaatttttattttttttattttatttcgtttgtcgcggtcgggttcgcggtttgcgttgtagcggtcgtcgtcgttttttggaagtagtaatttttttattttattttagttttggttttcgtttagtcggtgagtttgaagtcgtcgttgtttcgagttttttgtcgttgggagcggtatatggggttttcggattttgatgtgggggcgggggaggaagcgattaggttcggtacgaaggagggagaggtggtttgaggagcggaggggggatgtgtggatttcggtgaaagggatttgataatcgtttttaattcgtgagaaaaggaggagttcggtttttgtttgagaatgataaatttggaaatttttgggaaaggcgtgggggttatgtagagatttgtattggtagggagtttgagtcgaggtttttgtcggagttgatatagaggagagagggttttggttttcgggagttttagggatgtgggtcgggttggtgggttaaagtatttgttggttttttttaagtggtgggattttaaagaatgtttaattttaaagaaaaggggttgagatgtaaattagaggagttggagaggagtgttttagagtttgggttgttttaagaaagggtggtttcgaattttttcgtggttggagggtcgaatgtgggaggagggaggatattagaggtagggaaggagaatttgagttttattgatattgttttttttttagt

SEQ ID NO: 16 - DNA, 5942 bp, Artificial Sequence
  chemically treated genomic DNA (Homo sapiens)
gttagaaaaagaatagtgttagtaaagtttaagttttttttttttgtttttggtattttttttttttttatattcggttttttaattacgggagaattcggaattatttttttttaaagtaatttaaattttgaagtatttttttttagtttttttaatttatattttagttttttttttttgaagttaaatattttttggggttttattatttgaaagaagttaatagatattttgatttattagttcgatttatatttttggagttttcgaaggttagggtttttttttttttgtgttaatttcggtagggatttcgatttaggttttttattaatataagtttttgtatgatttttacgttttttttaagggtttttaagtttattatttttaagtaagaatcgggttttttttttttttacgggttgggggcgattgttaggttttttttatcggaatttatatatttttttttcgttttttaggttatttttttttttttcgtgtcggatttggtcgttttttttttcgtttttatattaaagttcggagattttatgtgtcgtttttagcgataagggattcggagtagcgacgattttagatttatcggttggacggggattaggattggggtggggtagggaagttgttatttttagggaacggcggcgatcgttatagcgtaggtcgcggattcgatcgcggtaggcgaagtggggtggggggagtggaaattagggagggtggggaagagggtaatacgtaagcgttaagggttaggtgtcgcggtggatgtcgggatacggagttttcggtagagaaagaaattggttaaatgagagaaagcgaattattaattttaggatgattcgcgtacgatttggttgttacgaaggttcggaggagggcgtttgcgggcggggtataacgagaagttatcggaagcggaagttaggtatggcgttcggggttcgggagtttgggtaatatagttttgtgtttattgggtgaagaggttgatttagggcggggaaaggaggaagttaggttggattttttttcgtagttttttttacgtttttttttagtttcggcgcggcgttgttgtttaggggattggtttattttcggttaattcgttgggtttttattgtttgttgggtttttagtgcgaattagtttcgttagagatttttgacgggtatattgtttttttcgggtttttgttttatgaggggagaggtgcggtttggtttcgtgcgtagggatttgggtggggtggggtgggcggtgtgagaattggaacgttttagtgcgttaatttgaggtggtgttagttattttgttcgtttttttgtatttttttatttttttttaggttttaagtgtgattttcgaattttggttagagtaatggtgaggggtaggcgtgacgttattttattatacggtttttcggtattttataggttttttttcgttttttgagggttttttttaatttatagagtggatttttggttttagaaaatgggtttggagcgggggttacgttgaggaaggcgaagggtattgtgggggcgttatgtaaaagtaggattttaatcgatagattttagtgttcgcgttatttgggcgcgcggagttttgttcgtttattattgaaaaagttttagcgcgggaaattgaattcggagttttgcgtacgttcgagtttttaagtaatgtgggttgtggtttttgttgttgttgtcgttacgtatgcgttttcgtgtcgtgtggttatttgattgtgttaatttttttgattagaatggcgttattttgcggtacggaagttatatagtaatacgtataggagatttttttcgagattttttagggagtgatttatttatttttgtttgggaagaggaaatttcgaaatgggatcgcggaagatttaaagggttaggttgattttttttttttattggtatgttttacggggtgggaaagtggttttagaaagaggttggtgtttattgttggtgaggatgggggtgggggtcggacgtaggatttttggataatagttttatggagttttattaatttttattaaggagtaaagtcggtattgtagggttttatgtttttacgtaaagttttttttttttaggttttgtagagttttaagttgtggggttattttagtggtaggaaagtgtttttgattatttttttttattttagtaggtttttgaggttgtggttgttatagggttattacgagtttggtttatttgttttattttttttttgtttggtattatttttttagtttttttaaaagttatgtttcggtttttgtttattatttttattttagttattgattttagcgatttttggaaggatgggtagtagtagttatagttcgagaagttagagtttattttggatggggttgtagttcgagttttttatgaggttttgattggggatgagagtagcgtttttgatttttagagattttagattgaatttgttagagaaagaaagagaaagaaaagaagaataatgaaggtattagtagtagaagtagtggtagaaggagtattaggaagatatggataagggagattttttgaggttgaggataagatgatttatcggatattgagggtagtttaggagggggatttgttagaatttaggagattgttggaatcgtatgaggtaggaggagttggggggaatattaacgttcgggatgttttttggtggattttattgatgtgtgttgttcgagcgggttagggggtagttgtgagttattttttgggtcgtggggttgtttgggtgggggtttgtgagttgagtggtagggatgcggtttagttcgttgaagaagttggtttttttgaggtagttcgtatggttagggagagttatggagagataaggagttcggaaaatcggtaaggggaaattttagtttagatttatgttttattgtgttttgttttttttagttatattatattagacgttttagtatagtgttgaagagttttttttttatttttatgtgtaggttgatagggtagtatagttaagtggttataaatatgagttttttggatttaaagtttgattttatttatttgggtaaataatttaatgtttatatgttttagtttttttattttagaaatgggggtagtaagaatcgttgttaggatttaatgggttaatatatgtaaaatgttagaatagtgtatgtcgtatagtatgtaatatatgaatgttagttatagttattatgattaatgtttttttttttgtttaagagtttgttaggtttggttattattttttttttttaattattttgttttggattttataatggtttaaagaaatttgtttttaagataagttaagtgtagtagtgagaaggaggggaaaagtggagtaaggagtttgatttgtaattgagtgaataattaatttagataatttattattatttttggattagtttggattttttattgttaagtaggaaggaaggtaatttgtttttttttttttttttttttttttttttgagataaagttttatttattttattttgtcgtttaggttggtgtgtaatggtgtgattttagtttattgtaattttcgttttttgggtttaagtatattttttgtagaaagtaggttttgtcgggatatggtggtatgtgtttgtaatttcggttatttgggaggttgatgtaggagaatcgttaaggtggaagttgtagtgagttaggattatggtattgtattttaatttgggtagtagagtaagattttattttaaaaaaaaaaaaaaaaaaaagtaggcgttgttattttgtttaggttggttttaaatttttgagtttaaagttatttgttcgtttttgttttttaaagtgttgggattataggcgtgagttattatgtttagttggtaatttgttttttagtagaaaagttgaaaagattttattttattttgttagttttttttgaggttttaattttttttttttttttttttttgtttttaatgtttttttttttttttttgtaggttttttattttttttttttagtattgcgagaattgtgatatttatttttaagattttaattatcgtatatttattgtttatttgttgttattgtcgtagggtttttagttttttaattttttatttggggtgtttatttttagttcgggttttaaattgttgttgagggggggttgggagttaggaatggggttgggatttcggggtgagggtcgtgttaattttatttttattgtttttaagagagattaggaaggattaggttatagattagtattttagtttcgagtgatatattttttagtttgggatattcgagttgtggttgggagggagagattttttcgggtggttatattgagttggagggaggagagaaggagggaggagaaagatagggtttgggagcgggatttaaggatttatatgaatttcgagttttgattttggtaaagtttgattttagtttgttgttgaagtttgaatttgggtttttgatttgggttttttgattttttttttttgggatttgtttagatgtagattttgaagtttttggttaataggttttgttttcgtgagagacgggttgagagttagaaataaattaattatttgtggtttatttatttttttggaagttattttgaggaagttaaatagaagtttgggagttatatgtaagttttatttgagttagaaggggtagtttttttaggtggtatgataaggttatttttttgttaatttgggtttatttttaggttttagatttttttgggagttttttatttatttttttaatttttttggattaagaattgtttagtttcgtgtaagttttattttttttaggaggagttttttgattatagttaatttattgattttataaatataagtttatatattatgtgttaagaatataggtaaagatatttttaatttttaaagagtttatagttggagagggaaagtgttatgttattaattttttttttttttttttgagatgtagtttcgtttttattgtttaggttggagtgtaatggtatgatttcggtttattataatttttgtttttcgagtttaagggatttttttgttttagtttttttagtagttgggattataggtatgttttattacgtttagttaattttgtatttttagtagagacggggtttttttatgttggttaagttggttttgaattttcgattttaggtgattcgtcggtttcggttttttaaagtgttggggttgtaggtatgaattattattttcggtttatgttattaaatattataatgtagggtgataagggaagttaaggtttttagagatgagaatgggtagggttttgttggaagaggttagtgtgataggagggtttacgattattaagtttgtatatttagttgaattgggattagaattttagtttttaaatttaaattttaagttaaatttttttgttttatttatttgtttatattttttttttttatatttttttatttttttattatttatttttttgttttgtttatgtcgggtggtaggtataagaagagtttattgttgtgaaatttaggaatttaaatttgtagacgggtaggggagggttgtttaagtcgtaagattttttatttttttttttttgggaaagttttttatgaagttttggatgcgaaatggaggagtggtgggggatgtggaaaagaatttaggggtagggggttgtagggggcgatcgagtttagggaagtatgagaaattcgggaaaatggggagttgggtttatattaaggttttggtttttg

SEQ ID NO: 17 - DNA, 18997 bp, Artificial Sequence
  chemically treated genomic DNA (Homo sapiens)
atatttggtgatttttgtatttgatggattagttggtattatttagattgatgaattggtttatttgattttgtagcgttttttatttaggaatttagggtaagaagatagttttgattttttatgattttattttcgattattaggattcgtggtttattggtttttttaattaagttgtttttaaaaattttgattttcgaatgtttggggagattgatttgagtaataataaaatttcgtttttttgtatagttggttgtgtatgaattattttttttttattttaattgtttagttttgatgaattagttttgtttaggtagcgggtaaggtgaattttttgggaggttataaattttttttttatgattgtaagttattattgagtattttaaaagtaggtggagttgataaattgatagtttaggtttggtagttatagattatttttgttttaaatgggtattattgttatttgaataaattgtgaataaggtatatttttttgattgaatatagaaatgagtggaatagtttataagttgttttgtttaatgatagttattagttataagtggttatttagatttaaataaaagttaaataaaatttttttagttatattgtaattaagtatttttatttttttaagagatagtttaatgatttttaaaaaattttttttttttttttttttttttttattttttttttagttttttagaaatgtaattgtagttttttattttttttttattagatattttttatggggtaggtttatttaattatgtgtttagaagttttagagaggaatttttatttatcgggaggttgttttgagagataatagtttatttataatttaaagtatgtttgttataaagtttttttttatttggagagttttggttatttttataatttagttttgtttataaaaggtattagtagttattgtttagtagataaggtattgaaggtagtatgtagattttttaattattcgtttttttttttcgtgttatttatgttagtattttatgttttattttaaaagtattttttttttgttttaaaagtgaaatggtatttttaaggtagaaaattagtatttttttttttaaggtagttttggaataaaatattattttttttatattagattttatttttgttaagtggattttgtaagtagcgagagagtgaatttgtatttgggttataatattaattagtttaagtgtttaatagttatatatgtttagtagttattatattgggtagtgtagagatattgttatagaaaattttattgtatattgttgtttaggtattgatgattttagttttatgttgtggtgagtgatttgtttttggaaaggataatatagtggatttattttcgggtgttagtaagggggtaaaattgaggtttttttgagatttttaaatagttaggagggagggaaattagataaaggagttgaaaagttgttttattttattagaaattgaaaggatgaagggatatgggtttattgaagatatttattgttttattaggatttgattagaaatttgatattttaaaaatttgattttgtgttgtttgtaatttgattttttttaaatttttatttttgaaaataataatttattttatttgttttattaggaaataaggagagggggttttggttatattggggttaaagtttagaaggtagagattatatatgtaatagtagttaatagaagtaaagaggggaattttaaggtaaacgtgataatgtaagggaaaggaaatggaaaagatatttttttttatgcggagattttttttagaagagttattgtttatttaaattttggaggatttgtgttttttttggtaaataatgtgatttttttttgtagaggatgtatgatgtaaaattatggattttgtttttaagggaatttttttgtttttttatttttttattgttttatgtaatgaaatttttaaagtatattttgattttagttttagtttataaattagatttgttttttaagagttatttgagttgtagtttttttagtgttattttttgtatatttaaattattgggggcgttgtagtttggttaatttttaattatttagagaattaggagaagtagatatggttaattattaggattaatgatagttaataagagtaaatatttattgaatatttattgtttgttaaatattatgttaatagtttaatgtttaatattattttatttaatttttatataattttaatgagttaggtattgttatttttgttttatagaaaaggaaaatgagattgttagattgagtaatttgttttagattagataattagtaaatagtagaattaaggtttaaatttaggattgtttgattttagagtttgtatttttatttattattttggataagaattttaaattatattaatattttgatttaaattaattgaaattaatattagtgttagtaattttttattgatagattagttaaaaatgttttaatgattatagaattataaattgaatagagaagtaggtttttttttgttgttttaagtagtttagaaaagttttagtgtagtatattggtgtgattagtaggttttagaaataaatgtatttaataagtttatttggtgttttttattttttttttttttttgtgagagtttttggggagattttaatgatgatagttgatatggattaaaggtagataaaatataagggagaaaatattggaaggagtttggttgatggaatagaaattttttgaagaatttatatttgaatgattaaaaagtattagtttagtttgtaaagtttgaagttgaatattcgtgaggaagttatttttttatttgttgatgaggtagagagaaaggtttaatttgttagagaaattgatgttttttgttatattatattgaaataagaattagtttgttatttatttttttttttttttttttagtaatataggtttaggttgaatttatgtttatatagttgtataaatttttacgggtatgaatataaatttatttatttaaatagattttaaaggttttttaggttattttttttttttttagaatttaagtaaggttttgattattattgataatatattcgttagttaatgcgtgtagagtttttagtttaaaggtaaataaaaagtgaaaaggggtcggcgtagtggtttatttttataattttagtattttgggaggttgaagtaggtagattatttgaggttaggagtttaagattagtttggttaatatggcgaaatttcgtttttattaaaaatataaaaattagtcgggcgtggtggtaggtgtttttaattttagttattcgggaggttgaggtaggagaatggtttgaatttaggaggtggaggttgtagtgagtcgagatcgtattatttattgtattttagtttgggtgataagagtaaaattttattttaaaaaaaaaaaaaaaaaaagtgaaaaggtaggaacgttgttgtttatttgttgttttaggaattttgtttacgtatagtttaaaatattaagaagttgaaaataaagtatttggttatgtgtggaaaaatttatagttaaaaggtgagatgaattgggtttagaaggtcggatttacgtgaaattaaaagggtaacgaaagttagaatttaattttttaaaaaaagttaaaataggtcgggtgtagtggtttatgtttgtaattttagtattttgggaggtcgaggttggcggattataaggttaggagttcgggattagtttggttaataatggtgaaatttcgtttttattgaaaatataaaaattagtcgggcgtggtggcgcgtgtttgtagttttagttattagggaggcggaggttgtagtgggtcgagatcgcgatattgtattttagtttggtcgatagagtaaggtttcgttttaaaaaaaaaaaaaaaaaaatagttaaaatttttaaaataattttatttgttaaaatataaaatttgaaattattttagttttttttgtaaaatgagttggagagagtagggttgaattaggtatgttttttcgggtttttcgacgttgatatttcgggatattatattaggtttaagatattagtttgcggaaagagagttgttaaatttgattatatgttttttgtacgatattcgatagttgtttttttttttattagtttttttaaggttgtaaatatatttgatttacgtgagagtttttataagttagtataacgttaggttttaaggaggcgtttaataaatgttggtattgtagggttagatttcgagttttagtttagaattttgttgaggttaggttttttttttgtttttcgttttttattatatttatttatttttttaagtaattaagtttaaattggggtttgtgtagtgattggtcgcgtcgggttttattgcggatgaatttgatttgttttaatgatttgtgatagatatttgtagatagcgtttttaatagaattagggttaggttggtattaaattttaggaacgttaggtattgttttaaagtagatgtaaatcgttaaattttttaggatttagaaggattagagagagtcggatatttttggttagttacgcggtttttagtaaagtttattttttttttttttttagtgtgttttgttgttagagtaattgtgggcgttatcgagttgacgggcggaaatagaatagaaagagtatacgtttttagtttattgatagggttattgcgtagacgtattaatttttttgagttgtagttgagtttgttgatgtagttcgcgtttgcgtattagttgttacgcgttttggtcggttttagcgtttgcgtaaattggtatatcggggagggcggagttaggttacgagggtgcgtatgcgtaaatagtatattcggtgtggtcgacgggttttttaagagtttggggcgcggattggagtattttgcgtgtagttatgtcggcgtcggtagtgtttgttatttcgcggtttttagaagagtatttgagttttatttcgtagcgtttgaagttgttggacgcgtatttgttgtatatattgttgatcggggcgttgtagttcggttattgttttttcgtggggatttttttttttaatttttttttttcgggttttattttttgtgtggggagttttattttagcgggtaatggttttataagtgattataataataatgtgttattttggtgtgttgtttttgtttttatagtattttatattagattatcgttttttgaagttatgagaagagtttgtattgtttttttgttgtgaatggggaaattgaggtttagaaagtttagattatatgtttaatattaaacggtttcgtaggagttggatttaaaagtttaaagaaattattttcgtgtcgttattttatttggtgatttattttatttaatattggttcggggaaaattttattttaattttaatttaggtttaatataattttaaaattagtagattttttaaatgaaaaatttaattttgaattatttttgttattttggtttaattattattaattttcggtgaaacgttttaatgaaagtgtaaagaatataaatattggtgttttttttgttgaattattttttatttgattttgttttttagttgttattatttttttttttgttgaggaagttgttattttattgttttgaatttaatttttgtttatataattttattttagttttatttttttttttgattttaggatttggtaattttgtagattgttatatttagcgagaatagtttttattaatttttgttaaaatttgattttttttgtttaacggggatttagtgaatattgaaaataggcgtggtttttattattggtattatttgttattttgattttgaaaatatgttagtatttatggtttttttttagtgtgattattagttaggttattagttgtatttttagtttaatatgaggtattatggtaaaagttttggtatatgttttttattcgtaaagagtttatggtttagttggggtatagataaaatatagtattggaattgtttggaggtttggtatagtggtttatgtttgtaattttagtattttgggaggtcgaggtaggtagattatttgaggttaggagtttaagattagtttggttaatatggtgaaattttatttttattgaaaatatataaattagttaggtatggtggtatatatttgtaattttagttattcgggaggttgaggtagaatcgtttgaattcgggaggtggaggttgtagtgagtcgagatcgtgttattgtattttagtttgggtgagagtgaggtttagttttaaaaaaaaaaaaaaaaagtttggtgatagtggtgttgtgtttaaagttatagatttatagaatgtttattgtatatttatattgttttgatatattagagatattttttagaatttaaaataggtttgaggatttaatgatttgtgtattgaagttgtagattagttttttgattggatatttagttattatttttgatttttgttttagatgattaagatttagttgtttgtggtggcgtttttgtttttaggatgtgttaattattattcgattagatatattatttttttgttttaagtattttttattatttatttatcgttttttgttacggtattatatgtttttattagttagttcggagaaggaattttgatgagaatttttgatttaattttgtttgatgtttttgtttttaggtttggaagagtaggagtaaggtagggtttgaaagttgattttaaaaaagatgttttttttatgtagaagttattttgtttttataagtttttagggtttagaatgattttttatggatgttttgaagaatgtggtttgttgaagagtgggtatggattagagttatagattattagtgtaataaagttagaaggtttttttgagtaaatgatttttatttatgttaagatttgtttttgagttcgttgtggttgaaattgaattggtagattggattgttttttttttttttagtgggaattaggtggtttgttattgaagaaaaatttagtaaaagggtatattagtaatggggttaataagggggattaggatttttagatttgttagataatagataatagagttatagaaatgaaagtaattttaagaaaagaagggatttatgataatttttagttgttatagaagggtatgatttattttttttttgatagtattgatttttttaaattttgttttttttgttatttgttagtttagattattaattggagattggttttaatgggaaatttggacgtttattttttgttttgattgttggtaaaggtagttttgtttttttttatggtgttggggtttttaatttttttgtggaattttttgttgtaagagaatggaggagtttagtgagttgggagagggaaatgtaggcgatattgttgaaggattaggtagtgttgggtgttagatgtttgaatgttaggttaaggaatttggattttttttgagatggagttttgttttttttttttaggttggagtgtaatggcgatttcggtttattgtaatttttgttttttaggtttaagtaatttttttgttttagttttcgaagtagttgggattataggtatgtgttattacgttcggcgaattttgtatttttagtggagacggagtttttttatgttggttaggttggttttaaatttttgattttaggtgattcgtttgtttttgttttttaaagtgttgggattataggtgtgagttattgtgttcggttaggaatttggattttattttgtaggtaatagtaaagtttttgaagatgtttttttttttttttttgagacggagtttcgttttgttttttaggttggagtgcgttatttcggtttattgtaagtttcgttttttgcgtttacgttatttttttgttttagttttttgagtagttgggattgtaggcgtttgttattacgtttagttaagtttttgtatttttagtggagatagggttttatcgtgttagttaggatggttttgattttttgatttcgtgattcgttcgtttcggttttttaaagtgttgggattataggcgtgagttattatattcggtattgagggtgtttttttaaagaaaggaaaagatttaaaattggtgttagtatgtaggatgaattggagggaaatgttttttaattttttttatttttttttggtagtttatttttttttattttttttgtatgtgttagtttagtatatgttttttggaaattgattagtatattttaaattaatttagaacgttattaaatttttaaaaaatttgttgttattgggtttgatggtatgaaaatagtttgtttttttttatttttttatagttgagagatttaattatggttttaagaaggaattagaggtagaaagttgttattgagagatttttttttgtgtgtgttttggattattagagtataatatattggttttaaaaggattttagaggtagaatatttttttatttgagatagattttaaatatttagtagttgattgtttattttgtagttagatatttttagaagaggatatttgttttttttttagagttatattttagtgttggtaattttttagtttttttttttgtttaattgaaagttgtgtttatttaaagtgttatttaggagggataagtagaaaatattaagattgtttttaaaataagtttttggttttgaaataagttttaatttattttttaatttttatttgttttgttttttaatttatatgaggtaattttgttttaaaaaatagttttgttttttttagtttataaatttaaaattagtttgaatttgtaaggtaaggaggtttagtttagagttttttgttttacgggagttattaggttgttgtggattggggtttagtattttttttggaattatttattagatttgtggattttaatattattttttataattgttattcgagagattagaagtttgttatttatgtgtttgatagttttgtttttaaatattttttatattattgttatttttttattttttgttttagttttttaatattttttatgaagattattgtaattttttttattggtttttcggtttttggtttttagtttattttttattgtgtttgtaggtttgatttgatttgtaaatttgattgtgttatttttatgtataatttgtgttttttaaagtaaaattaaaattttttttttgatatataggtttttttatgatttggttttttcgttgtttgtagttttattttttgtttttgttttttttatattttgttttaatagtattgagttatttgttattttttgaatatttttatgtgttaaattatttgtttttgtttgattgtttttaaaatttttttattttttagattttttagtttaagtgtaatttttttttttttttgttattgtttttaaagagaataaggttttgttatgttgtttaggttggttttaaattttttggtttaagtagttttgttttagttttttgagtagttaggattataggtatatagtattatgtttggtttattgttttttggaatttttttttgattttttagtagattgaggttttttttttgtattttttttttattttgtatgtgtgtgtgtgagagagatatggtattgtgttgtatttgggtgtttgttttttttttggaaggtgagtttttgagggtaggggttgtttttttatttttttatttttagtgttgaatattgtatatgttaaatggtgagtaggtttatagttatgttaggaatagtgagtaatgatgtgttaggttttttgttaaggtgttgggaatttaattgtgaagtatatagacgtggtttttatttttatagagtttgtaattagtgggaaatatagataagtaaatatggatatggtgttgatggagaattattggtgagaatgggaatataatgtgtatttaattttgtttagtggttttgtaataatattttttttatatattcgtttttttaaagtaggttttataaattattttattttttttttttttttttatttttagttggtgattttgtttttatttttttattaaaaaaaagaagtagataagaatttttttatttttttattattgaattataatagattatttatttttatatttatattttttgattttttatggtggatgatgtgttttttttttgtgaaagttttgtttgtgtagaggatttagtttttttttgtttatttagggatttcgtttttgtaattatttttttgtttcgtgttattaatttttgttttttttttggattatttttattatataaatatgttttaatattgtttatttaaaaaaaattcgtttgattatagataattttttagttattattttattttttttttattattatagaattttttgaaagaataattaatgtttttatttttttttttaattatttattttttaatttatttttggtattggtttgttttcgttattttattgaattattttattgaaattatttttgttatgttgtaacgtttagtatttaatgtaggtattggtttttgtgtaaaaggaaagtttttttttgaatataatatttttttgtttgttttgttttattttattgtttttttttttttgttgttttgtgttgggcgtttttttgattgagagtatggttgtagatatttttattttgtatttttttttaaatagataaatttaaataatatttgtatatttataattatttttttatatttttagttttgaattgtttttcgaattttaaattagtaaatttagttgttaatttgatgtttttatttgatgtttgatatgtattttgaatttaatatgtttaagattaaatttgtttatttagttatttgtttttttattagttagtacgtggtgttaatgttggttgtggttttttttttttttttttttgagatatagttttattttgttatttaggttggagtgtagtggtataatttcggtttattgtaatttttatttttcgggtttaagtaatttttttgttttagttttttgagtagttgggattataggtacgtttttttatgttcggttaatttttgtatttttagtagagacgaggtttcgttatgttggttaggttggttacgaatttttgattttaggtgatttatttatttcggttttttaaagtgttgggattataggcgtgagtcgttatgttcggtcggttgtgtttttaaatgaagaaatttaagttttcggggttttttgattttttttattttttgtatttgttttattagtaagttttgttttttttaaaatatagtttgtatgtttttatttttgtttatttttattattatttttttgagttttttgggttttaagtaatttttttgtttttttttattttttatatttttgagacggagtttcgttttgttgtttaggttggagtgtagtggcgcgatttcggtttattgtaagtttcgtttttcgggtttacgttatttttttgttttagtttttcgagtagttgggattataggtattcgttataatgatcggttaattttttttttttttttgtattttttagtggagatgggttttattatgttagttaggatggtttcgattttttgattttgtgattcgttcgttttggttttttaaagtgttgggattataggtgtgagttattgcgtttggtttatttttatttttatttttatttttttgagacgtagttttattgtgtcgttaggttggagtgtagtggcgcgattttagtttattgtaattttcgtttttggagtttaagcgatttttttgttttagtttttttagtagttgggattttaggagtttgttattgtattcggttaattttttgtattttatttttagtagagatggggttttatttttttgattaggttggttttgaatttttgattttgtgatttatttatttcggttttttaaagtgttgggattataggcgtgagttattgcgttcggttttttgtttttttttaattttgcgaattattatattgttttatcgtttttataattgaatttatattgttttttgaggtttattatgttttttaggatttggtttttgtgtttttttttttgattattatagttttgttggtttgtttttgatttttttttttttttttttttttttttgagatggagttttgtttttgttgtttaggttggagtgtaatggtacgatttcggtttattgtaattttcgtttttcgggtttaagcggtttttttgttttagttttttgagtagttgggattgtaggtatgtattattaagtttggttaattgttttgtatttttagtagagacggggtttttttatgttggttaggttggtttcgaattttcgattttaggttatttattcgtttcgattttttaaagtgttgggattacgggtgtgagttattatgtttggcgtttgtttttgtgtttataatatgttaagattgtttttattgtttagaatgttttgtttttagatttttatatggttggttttttattttttaaatattggttttaaatagtaagtttttaaagagattttttgttatgattgaatttaagaaaagttttttagttattttttattattttgttttattttttttatagtatatatttttatttagtagtttttggtttatttgttaatttattgattatatgtttttttttataggagtgtaagttttttgagagttagattgttttgttttgtgttatatttttagtatttgaaatgatgtttgttatgtagtagatgtttagtaaatattttatggaataaatggatatttaaggggatagagtaaattagaattgttaaaatggaatagattgtttgaagaggtagtaaatttttatttttggaagtgtttagggagagattgaaggattattggtagtggagtattttgaataggtttttttttttgttttttttgtttttaatgtatttgagagatgtgatatttttattagtaatataggttttggaaagttgataattttttatttggaggtggtttattagattttgtaagtggtgagtatattttggaaagttttttacgtgattagtacgtttttttaagtatggttattttttattattttttgggtattgtatatattaaatggggtgttggtgtttatgatttttgaggttttttttaattttgtgggattttgatttatatgtttttattgaaataatttggttattatgattataataataataatattaatttattattttatttatttttatggataattttttttttttttttttatatttttttaaaatttaatatcgtgttttttattttaatgattattattaatagttttttatttttttagatttttttttagattttaattgaaatgataagataattatgtatattattatatgtaaataaaatattttattttttttttgagacggttttgatttgttttttaggttagagtgcggtggtatgattgtggtttattgtagtttgtaatttttattttttgggtttaagtaatttttttattttagtttttcgagtagttggggttataggtgtgtgttattatatttggttaattaaaatattttttttgtagagatagggtttttttattttttttaggttggttttaagtttttgggtttaagcgatttttttattttggttttataatatgttggggttatagttgtgagttattatgttttggttaagtgaaattaggaatgggttgggtgtgggggtttatgtttgtaatttttatttttaggtaagtagaggcgggaggattgttgggtaatatagggagattttgtttttattaaaaataaataaaaaaattagttaggtatggtggtgtatgattgttgttttagttatttagggggttgaggtgggaggattgtttgagtttaggaggtcgaggttgtagggagttatgattgtattattgtattttagtttgggcgatggagtgagattttgttttaaaaaaaaaaaaaaaaaaaggattggtttttttttatttaataagttttagatatgtttgttgttaatgtatagagaatttattttatttttttgaataattgtatgggattttattgtatgttagttgtatagtttaatttttttgatgtttagattgttttaattttttttttaattttataaatatatttttagaatgtttttgttttgtaagataaatttttttgttaaaaggtaaaattattttaaatattaatggatattgttagttgtttttttaagtggatgaatgaatttgtattttttatagtaggggtttatattggttatttttgttttagttattgtttttaatatttttaagggtttggatatttgaaaggattaatggtgtttttatggtgtttatatgtttaagtataatgaaaattgttgttatggtgataggttttggagaattagtttgatagttttttggtttttggattagatttgtttgttgtttttttttagttaatgatgggatgatgttagtttgaagcgagtttaggtttttttaagtaatgtaataatttattataggtataaagatatttcggaagagtgtatttttggaattgtttgtttttttttttttgttaatggtgattgttagaatttttaaggggatggagtgtggtagtggagagtttttatgaattattttttttaggttttttgttttttttgagataaataagtagttgttagaatttcgagattaaagatagtttatcgagaattgtgaggtttttaagaatgagcgtgttatttttataaattttgttatttattaaatgaatattttattagaaaataatttatatttttataattttttattatttagttcggattttttgttgttgttttaagtgtatttttatttaggtataattagaaatttttaaattagtagataagagagttttgtgggttttttggttatatatttttttttttgagaaagtttttaggttttagtgtaattttgagaagtaatatttttttttttttaatagagtgcgaaatttaattgtataatttgataaatttttaaatgtatttgtttaattattatttagattaagatgtaggatattattagtattatagatgtttttttgtatttttttagttattttttttttgtgaaagataaaaattattattttgttatagattggttttattaagttttaagttttttgtatatggaattatatagtatatatttttttgttttgttttgttttgagacggagttttttttgtttaggttggagtgtagtggcgtaatttcggtttattgtaatttttattttttgagtttaagtaaatttttttgttttagttttttgagtagttgggattataggtgcgtgttattatgtttagttaatttttgtagtttttattagagatggggtttttttatgttggttaggttggttttgaatttttgattttaggtgatttatttattttggttttttaaagtgcggggattataggagtgagttatcgtgtttggtttttgttttattttttaatttttttttttttagatggagtttcgtttttgttgtttatgttagagtgtaatggtacgattttggtttatttttatttttatttttattaatttttttgttttattgttttagtttgttaagtaattgggattataggtatgcgttattatgttcggttaattttgtatttttagtagataaggggtttttttatgttggttaggttggttttgaattttcgattttaggtgattcgtttgtttcggttttttaaagtgttgggattataggcgtgagttatcgtgttcggttttttttttgtttgtttttggttaagataaaatatgataaaatttattattttaattatttttaagtgtatagttttgtggtattaagtatatgtatattgttgtaaaattattattattatttatatttagaatttttttgtttttcgtaattgaaatttagtttttattaaatagtaattttttatttttttttttgttagtttttggtatttattattttattttttgtttttaggagtttgattatttttgatgttatataagtgaaattatatggtatttgtttttttgttatggtttatgttatttaaaataatgtttttaagatttagttatgttgtagtaggtattagaatttttttttttttaaggttgagtattttattgtatgtatatattatattttgtttattcgtttttttgttgatatttgggttgtttttattttttggttattgtgattaatgttgttatgaatatgggtatgtaaatattgtttgagagtttggttttattttttatttttttaattttttagatggagttttttttttgttatttaggttggagtgggacggagtgatgtcggtttattgtagtttttattttttgggtttaagcgatttttttgttttagtttttttagtagttgggattataggcgtttattattacgtttagttaatttttgtatttttagtagagacggggttttattatgttggttaggttggtttcgaatttttgatttcgggtgattcgtttggtttagttttttaaagtgttgggattgtaggtgtgaattattgtgtttggtcgagattttgtttttattttttttggatatgtatttagaagtggaattgttggattatatgatatggtaattttgtttttaatttttttgaggaaacgtagtattgttttttatattggttattttatttgatttttttatttgttagtgtataagggttttagtttttttgtatttttgttaatttttgtttttttgatattagatattttaatagatgtgaggtgatatttcgttgtaattttgatttgtattgttttagtgattaatgatgttgagtatttttttatatgtttgttggttatttttatattttttttggggaaatgtttatttaagttttttgtttattttaaaatttggttattattttgttgttaattgtattgtaggggtattttaatatattttgatattaattttttattagataagtgatttgtaaatatttttttttatttcgtaggtgtttttttattgttgtgttttttattgtatttttattatagaagttttaaattttgatatagtttaatttatttatttttattttgttgattatatttttggtgttatatttaataaattattgttaaatttaatgttataaaatttttgttttgtttttttttaagagttttttagtttttggtttttatttatttcggatttaggtttttgattcgtttcgagttaatttttgtagtatatggtataaggtaagggtttagttttatttttttgtttatggatatttagtttttttagtatcgttggttgagaagattgtttttttattgagtggttttgttagtttggttgaaaattatttgattttgtatacgagggtttttgtgtgttttttaaaaaataaagtaattaaattgatttattttttaattgtagtaaatgtatttttaaaataaatttataatggaaaatttgaattattatttttaaatagaaggttatattaaaaatattatggagttaggtagatgtgtttattcgtgtttgtggttttagttgtttaggaggttgaggtgggaggatcgtttgggttttagttcggtttgggtagtattattagattttgttttttgtcgagtttttagtggttttgtgtggttgtattttagaatattttttatttaattgagggggtatatttgtttttttagtatatatatttaggttttgttttgtggtttttgtgtgggagttgggtttttttgtttttggttttttttgggtatttgttaggttttagttggtttggttagttagtgtgtattttttaagttttgttcgggtacggtggtttatgtttgtaattttagtattttgggaagtcgaggtaggtggattataaggttaggagttcgagattagtttggttagtatggtgaaatttcgtttttattaaaaatataaaaaattagtcgggtatggtggcgtatgtttgtagtttcggttatttgggaggttgaggtaggagaattgtttgaatttagtaggtggagattgtagtgagtcgagattatgttattgtattttagtttgggtgacggagcgagattttgttttcgattttttaaaaaataaagtttttgattgtgttgtttaatttatttgtgtaatttatttatttttgtgtatagtagaagtttttttttattgtagtataatattttattgtttgtatatgttataatttatttattttattgttgatagatattagattgtttttagtttggggttatttgggtattatttttgtgtatgttttttgatgtatatatgtatttatttttgttagagtagaattgttgggttttcgggtatgtttgtgtttattagtatatttattttatatttttatataattatttttttgtgttttgttttttgtgtagt

SEQ ID NO: 18 - DNA, 18997 bp, Artificial Sequence
  chemically treated genomic DNA (Homo sapiens)
attgtataagaagtaaaatataaaaaaatgattatatagaagtataaaataaatatgttaatgaatatagatatattcgaggatttaataattttattttaatagaaatgaatgtatatatatattaaagggtatatatagaaatgatatttagatagttttaaattggaaataatttaatgtttattaatagtaaaatggataaattatagtatatataaataatagaatattatattgtaatgaaaaagaatttttgttatatataaaaatggatgaattgtataagtaagttgggtaatataattaaaaattttattttttggggagtcggggatagagtttcgtttcgttatttaggttggaatgtagtggtatgatttcggtttattgtaatttttatttgttgggtttaagtaatttttttgttttagttttttaagtagtcgggattataggtatgcgttattatgttcggttaattttttgtatttttagtagagacggggttttattatgttgattaggttggtttcgaatttttgattttgtgatttatttgtttcggttttttaaagtgttgggattataggtatgagttatcgtgttcggataaaatttaaaaaatatatattggttggttaaattagttggaatttggtaggtatttagaggaagttaaagataaaaaagtttagtttttatatagagattatagggtagagtttaagtgtatatgttgggggaataaatgtatttttttaattagatgaggaatattttgggatgtagttatatagagttattgagaattcggtaggagatagggtttggtggtgttgtttaggtcggattggaatttaagcgatttttttattttagttttttgagtagttgggattataggtacgggtgaatatatttgtttagttttatggtatttttagtgtgattttttatttagggataatgatttaggttttttattataagtttattttaaaaatatatttattatagttaaaaaatgaattaatttaattgttttgttttttaagaaatatataaaaattttcgtatataaaattaaatgatttttaattaaattgataaaattatttaatggggaaatagtttttttaattaacgatgttgggaaaattggatatttataggtaaaagaatgaagttggatttttattttatattatatattataaaaattaattcgaaacggattaaagatttaaattcgaaatggataaagattaaaaattaaaaaatttttagaagaaaatagagtaaaagttttatggtattggatttagtaatgatttattggatatgatattaaaagtatagttaataaagtaaaaatagataaattggattatattaaagtttaaaatttttgtgataaaggtataataaagggtataatagtgaaaaggtatttacggaatggggaaaaatatttgtaaattatttatttgataaagggttaatattagaatatattaaagtatttttataatgtaattaataataaaataataattagattttaaaatgggtaaaggatttgaatagatatttttttaaagaagatataggaatggttaataagtatatgaaaagatgtttaatattattaattattagggtaatataaattaaaattataacgagatattattttatatttattaggatgtttagtattaaaaaaataagagttggtaagaatgtagagaaattgaaatttttgtgtattaataagtgggaaaattaaatagggtagttagtgtgaaaaatagtattgcgtttttttaaaaaaattaaaaatagaattgttatattatataatttagtaattttatttttgggtatatatttaaaagaagtgaaagtaggatttcggttaggtatagtggtttatatttgtaattttagtattttgggaggttgaattaggcggattattcgaggttaggagttcgagattagtttggttaatatggtgaaatttcgtttttattaaaaatataaaaattagttgggcgtggtggtaggcgtttgtaattttagttattagggaagttgaggtagaagaatcgtttgaatttaggaggtggaggttgtagtgagtcgatattatttcgttttattttagtttaggtgataagagagaaattttatttgggaggttgggagggtgggggatggaattaggtttttaagtaatatttgtatatttatgtttatagtagtattagttataatagttaaaaggtgagagtagtttaagtgttagtagaagaacggataagtaaagtgtgatgtatatatataatggaatatttagttttaaaaggaaggaaattttgatatttgttataatatggttgaattttgaggatattattttaagtgatataagttatgataaagggataaatattatgtggttttatttatatgatattaagagtagttaaatttttagaaatagaaagtggaatggtagatgttagggattgatagagaggaggatgaggagttattgtttaatgggaattgaattttagttgcggaagataaaaaagttttggatatggatagtgatgatgattttataataatgtatatgtatttaatgttatagaattatatatttaaaaatggttaaaatggtaaattttgttatgttttattttgattaaaaataaataaaaaaaaggtcgggtacggtggtttacgtttgtaattttagtattttgggaggtcgaggtaggcggattatttgaggtcgggagtttaagattagtttgattaatatggagaaattttttgtttattaaaaatataaaattagtcgggtatggtggcgtatgtttgtgattttagttgtttggtaggttgaggtaatgaggtaggagaattggtggaggtggaggtggaggtgagttaagatcgtgttattgtattttagtatgggtaataagagcgaaattttatttaaaaaaaaaaaaattaaaaaataaaataagggttaggtacggtggtttatttttgtaattttcgtattttgggaggttaaggtgggtggattatttaaggttaggagtttaagattagtttggttaatatggggaaattttatttttaataaaaattatagaaattagttgggtatggtggtacgtatttgtaattttagttatttaggaggttgaggtaggagaatttgtttaaatttaggaggtggaggttgtagtgagtcgagattgcgttattgtattttagtttgggtaagagagatttcgttttaaaataaaataaaataaaaaagtatatgttatatgattttatgtataaaaagtttaaaatttggtaaaattaatttatggtaagatagtggtttttattttttatagggagaggataattgggaagatgtaaggaggtatttatggtgttggtaatgttttgtattttgatttggatagtggttagataggtatatttaaaaatttattaagttgtataattaaatttcgtattttgttaaaggaaaaaaaatattattttttagagttatattgaaatttagaggtttttttagagaaaaaaatatataattaaaaaatttataaagtttttttatttgttgatttaaaggtttttaattatatttagatggggatgtatttgaggtaataataaagggttcgggttgaatgataaaaagttataaaaatgtgaattattttttaatagaatatttatttaatgggtagtagagtttataaagatagtacgtttatttttgagaattttatagttttcgataaattatttttgatttcgaagttttagtagttgtttatttgttttaaaaaaggtagaagatttaagagagataatttatgagaattttttattgttatattttatttttttgaagattttaatagttattattgataaaaaaaaaaaaataggtagttttaggaatatattttttcgaagtatttttatgtttgtgataaattattatattgtttaagaaaatttaaattcgttttaggttagtattattttattattaattaagaaaaagtaataaataaatttaatttaaaggttagaaaattattagattagttttttagagtttgttattatggtaatagtttttattatgtttaaatatgtaaatattatggaagtattattgatttttttaggtatttagatttttaaaaatattaaagataatgattgaagtaagggtaattagtgtaaatttttgttgtagaaagtatagatttatttatttatttgggagagtaattagtaatatttattaatatttaaaatgattttattttttgataaaggaatttattttatagaataaagatattttgaaagtatgtttgtaaagttgaaaaaaaaattaaaatagtttaaatattaaggggattaaattatataattgatatgtaatgaaattttatgtaattatttaaaagaataaggtaaattttttgtatattgatagtaaatatatttaagatttattaagtgaaaaaaagttaattttttttttttttttttttttgagatagggttttattttatcgtttaggttggagtgtagtggtgtaattatggttttttgtagtttcgattttttgggtttaaataatttttttattttagttttttgagtagttgagataatagttatgtattattatgtttagttaatttttttgtttgtttttggtaaagataaggtttttttatgttgtttagtaattttttcgtttttgtttgtttaagggtagggattatagatatgagtttttatatttagtttatttttaattttatttggttagggtatggtggtttataattgtaattttagtatgttgtgaaattaaggtgggaggatcgtttgagtttaagagtttgagattagtttgggaaagatagggagattttgtttttataaaaaaaatgttttaattagttaggtgtggtagtatatatttatggttttagttattcgggaggttgagatgggaagattgtttgagtttaggaggtagaggttgtaggttgtagtgagttatagttatgttatcgtattttggtttgggagataaattaagatcgttttaaaaaaaaagtaaaatattttatttatatataatgatatatataattattttgttattttagttagaatttagaaaaaaatttgaagaaatagaaaattattaatagtggttattggagtaaagaatacggtgttgagttttgaggaaatatgagggaaaaaaagaaaaattatttatgaaggtggataaggtaataaattgatgttattattattgtgattatggtaattagattattttaatgaaaatatatgaattagagttttataaagttggaaaggattttagaggttataaatattaatattttatttgatgtatataatgtttaagaggtggtagggggtggttatgtttggggaggcgtattaattacgtgggaagttttttaaagtatatttattatttatagaatttggtaagttatttttagatggagaattattaattttttagagtttgtgttattgataaggatattatattttttagatgtattggaaataaaaaaggtaaaaaaaaaagtttgtttaaaatgttttattattaatgattttttagtttttttttgggtatttttaaagatggaaatttattatttttttaagtagtttgttttattttagtaattttgatttattttatttttttaaatgtttatttattttataaaatatttattaaatatttattatatgataagtattattttaggtgttaggaatatggtatagaataaaatagtttggtttttaaggaatttatatttttatggagagaaatatataattaataagttaataaataaattaggaattattaggtagagatatgtattatgaagaaaataaaataggataataaagagtgattgggaagttttttttaaatttaattataatagaaggtttttttaagagtttgttatttaagattaatatttgaaagataaggaattaattatgtaaaaatttgggggtagagtattttagatagtaagaataattttgatatgttataaatataaggatagacgttaggtatggtggtttatattcgtaattttagtattttgggaggtcgaggcgggtggataatttgaggtcgggagttcgagattagtttgattaatatggagaaatttcgtttttattaaaaatataaaataattagttaggtttggtggtgtatgtttgtaattttagttatttaggaggttgaggtagaagaatcgtttgaattcgggaggcggaagttgtagtaagtcgagatcgtgttattgtattttagtttgggtaataagagtaaaattttattttaaaaaaaaaaaaaaaaaaaaaaaaaaattaaggatagattaataagattatagtgattaaggggaaggatataagggttaaattttgaggggtatggtaagttttagaaaatagtatggatttagttataagagcggtggaatagtataatggttcgtaaggttaaaaagaggtagaaggtcgggcgtagtggtttacgtttgtaattttagtattttgggaggtcgaggtgggtggattataaggttaggaatttaagattagtttggttaagaaggtgaaattttatttttattaaaaataaaatataaaaaattagtcgggtgtagtggtaggtttttggaattttagttattagggaggttgaggtagaagaatcgtttgaattttaagggcggaggttgtagtgagttgagatcgcgttattgtattttagtttggcgatatagtgagattgcgttttaaaaaaataaaaataaaaataaaaataggttaggcgtagtggtttatatttgtaattttagtattttgggaagttaaggcgggcggattataaggttaggagatcgagattattttggttaatatggtgagatttatttttattaaaaaatataaaaaaaaaaaaaaaattagtcggttattgtggcgggtgtttgtagttttagttattcgggaggttgaggtaggagaatggcgtgaattcgggaggcggagtttgtagtgagtcgaaatcgcgttattgtattttagtttgggtaatagagcgagatttcgttttaaaaatataaaaaataaaaagaagtagaagaattatttaggatttaaagagtttaggggaatggtagtaaaaatggatagaaataaagatatataggttatattttggagaagatagagtttgttgatgaaatagatgtaggagataagagaaattaagggatttcggaaatttaaatttttttatttaaaaatataatcggtcgggtatggcggtttacgtttgtaattttagtattttgggaggtcgaggtgggtgaattatttgaggttaggagttcgtgattagtttggttaatatggcgaaatttcgtttttattaaaaatataaaaattagtcgggtatgggggagcgtgtttgtaattttagttatttaggaggttgaggtaggagaattgtttaaattcgggagatggaggttgtagtgagtcgagattgtgttattgtattttagtttgggtgatagagtgagattatgttttaaaaaaaaaaaaaaaaaaaattataattaatattgatattacgtattaattggtgaagaggtagatggttggatgagtaggtttgattttggatatgttaagtttaaggtatatattagatattaagtgaagatattaagttggtaattggatttattaatttggaattcgggggatagtttaaaattaaaaatataaaggagtagttgtaggtatataggtgttatttaagtttatttatttaaaaaaaaatataaagtgaaggtatttataattatgtttttagttagagaagcgtttagtataaaatagtagaaaggaaaaagtagtgaggtgagatagaataagtaggagagtgttgtatttaagaaaaaattttttttttatatagaagttaatatttatattaaatgttaaacgttgtaatatggtaagagtagttttagtgaagtaatttagtgaagtagcgaggatagattaatattaagagtgggttaaggaatgaatagttaagggaggaagtaggaatattaattatttttttaagaaattttgtaatgatggaaaggaaatgggatggtagttagaagattatttgtggttaaacggattttttttaaatagataatattagaatatgtttgtatgatgggaatgatttaggagagaaatagaaattaatgatacggaatagaggaataattgtagaagcggagtttttgagtgagtaagggaagattggattttttgtataagtagagtttttataggaaagagatatattatttattatgagaagttagagagtatgggtataaaagtaggtgatttgttatgatttagtggtgaaaagatgaaggaatttttatttattttttttttttagtgaaaaaataaaagtaagattattaattaagaataaaggaaaagaggaaaaatagagtgatttatgaagtttattttaggaaggcgaatgtataagagaaatattattgtaggattattaggtagggttggatgtatattgtgtttttatttttattaataattttttattagtattatatttatatttatttgtttgtattttttattaattataaattttgtgagagtagaagttacgtttgtgtgttttatagttgaatttttagtattttggtagagaatttagtatattattgtttattatttttgatatgattataggtttgtttattatttaatatatatagtgtttagtattgaggatggagagatgagaagatagtttttgtttttaagggtttattttttagagagaaggtagatatttaaatatagtataatgttatattttttttatatatatatatataaggtgaaaaaggaatatagaggaaagattttaatttgttggagagttagggaagggttttaaagggtaataagttaggtatagtgttgtgtgtttatagttttagttatttaggaggttgaggtaggattgtttgagttaaggagtttgaggttagtttgggtaatatagtaagattttgttttttttaaaaatagtaataaaaaaaaaaggaaattgtatttgagttgagaagtttaaaaagtgaaggaattttgaaggtagttaagtaaaggtaaatagtttgatatatgagagtgtttagagaatgataagtagtttaatattgttggagtagagtatagaggaggtagaggtaagagatgaagttgtagatagcgaggaagttagattatgaaagagtttgtatgttaaaaaaaaagttttaattttattttgggaaatataaattgtatatgggagtgatataattagatttgtaagttaaattaagtttgtaaatatagtagaagatggattggaaattagaggtcggaaggttagtaaggaggattatagtagtttttataagagatattgagaggttaaaatagaggatgaaaaagtagtaatgatatgaaagatatttagaaataagattattaggtatatgggtggtaaatttttaatttttcggataatagttatgagagataatattaggatttatagatttgatggataattttaaaagaaatgttggattttagtttataatagtttaatagttttcgtgagatagaaaattttggattaggtttttttgttttatagatttaaattggttttgaatttgtaaattaggaaaaataaaattattttttaagataaaattattttatatagattagagaatagaatagatgaaagttgggaaatgaattaaaatttgttttaagattaaagatttattttgaggatagttttaatgttttttatttattttttttaaatagtattttaaatgagtatagtttttagttgggtaaaaaaggaaattaaagggttgttaatattggaatataattttaaaaaagggatagatgtttttttttagagatatttaattataagataaatagttagttattggatgtttgaaatttgttttaaatagaaaaatattttatttttgaggtttttttaaagttaatatattatattttgatgatttaaaatatatataaaaaaagattttttaatgataattttttatttttggtttttttttgaaattatggttaagttttttagttatgagggaatagaagaaaatagattatttttatattattaggtttaataataataggttttttaaaggtttggtagcgttttgaattggtttaaaatgtattggttaatttttaaagagtatatgttaaattaatatatgtagagggaatagaagagaatagattgttaaaaaaaaatagagaagattaaagaatatttttttttaatttattttatatgttaatattaattttaaatttttttttttttttaaaaaagtatttttagtgtcgggtgtggtggtttacgtttgtaattttaatattttaggaggtcgaggcgggcgaattacgaggttaggagattaagattattttggttaatacgatgaaattttgtttttattaaaaatataaaaatttagttggacgtggtggtaggcgtttgtagttttagttatttaggaggttgaggtaggagaatggcgtgaacgtaggaggcggagtttgtagtgagtcgagatggcgtattttagtttgggggatagagcgagatttcgttttaaaaaaaaaaaaaaaagtatttttagaagttttattattatttataggataaagtttaaatttttggtcgggtatagtgatttatatttgtaattttagtattttgggaggtagaggtaggcggattatttgaggttaggagtttgagattagtttgattaatatggagaaatttcgtttttattaaaaatataaaattcgtcgggcgtggtggtatatgtttgtaattttagttatttcggaggttgaggtaggagaattgtttaaatttgggagatagaggttgtagtgaatcgagatcgttattgtattttagtttgagaaaaaagagtaaaattttattttaaaaaaagtttaaattttttggtttggtatttaaatatttagtatttagtattatttaattttttaatagtatcgtttatattttttttttttagtttattggatttttttatttttttgtaataggaaattttataggaaagttagaaattttagtattataaaaaggaataaggttatttttgttaataattaaaataaaggataagcgtttaaattttttattaaaattagtttttagttgatgatttaggttaataaatggtagaagaggtaggatttaggaaagttaatgttgttaaaagaagggtaaattatatttttttgtggtaattaagaattattatgaattttttttttttttgaagttgtttttatttttatagttttattatttgttatttaatagatttggaaattttaattttttttattggttttattattaatatgtttttttattaggtttttttttaatgataagttatttagtttttattggagaggagaaaggtagtttagtttgttaatttaattttagttataacgggtttaaaaataggttttggtataagtgaaagttatttgtttaaaaaaattttttggttttattatattgataatttataattttagtttatgtttattttttagtaaattatattttttaaagtatttatgaaaaattattttagattttagaggtttatgaaggtagggtgatttttatatggagaaggtattttttttaaaattagtttttagattttgttttgtttttatttttttagatttggaaataaaaatattaaataaaattaaattaaaagtttttattaaggtttttttttcgggttggttaataaaaatatatagtatcgtggtagagggcggtgggtgggtggtggagaatatttagagtaaaggggtagtgtatttggtcggatgatggttaatatattttgaaggtaaggacgttattatagataattaggttttggttatttaggataaaagttaaagatggtaattaaatatttaattaaaaggttaatttgtaattttagtatataagttattagatttttagatttgttttaaattttaagaaatatttttggtgtgttagaataatgtaaatgtataataagtattttataggtttgtaattttaagtatagtattattgttattagattttttttttttttttttgaggttgagttttatttttatttaagttgaagtgtaatggtacgatttcggtttattataatttttatttttcgggtttaagcgattttgttttagtttttcgagtagttgggattataggtgtgtgttattatgtttggttaatttatgtatttttagtagagatggggttttattatgttggttaggttggttttgaatttttgattttaagtgatttgtttatttcggttttttaaagtattgggattataggtatgagttattgtgttaggtttttagataattttaatgttgtattttgtttgtattttaattagattataaattttttacggataaagaatatgtgttaaagtttttattataatgttttatattggattgaaaatataattgatgatttgattgatgattatattgaaaagaaattatgaatgttggtatgtttttaaagttaaagtagtaggtgatattagtgatagaggttacgtttgtttttagtatttattgaattttcgttgggtaagaaaagttagattttaataaaaattgatggagattgttttcgttaaatatagtagtttataaggttattaaattttggaattaaaaggaaaaataaggttaaaatagagttatgtgaataaaaattgggtttaggatagtgaaataatagtttttttaataagaaaaaaagtagtagtagttaaaaggtaaaattaagtaaaggatgatttaataagaaaagtattagtatttatattttttgtatttttattgaaacgttttatcggagattggtaatgattaggttaagatgatagagatgatttaaggttgggttttttatttgaaaagtttattaattttagagttgtgttaaatttaagttaaagttggaatagggtttttttcggattaatattaagtgaagtggattattaagtggagtagcggtacgaaggtggtttttttagatttttaagtttaatttttacggagtcgtttggtattaggtatataatttaagttttttgagttttaatttttttatttataataaaagggtaatgtaggttttttttataattttaaggggcggtggtttgatatagagtattatgaaaataaaagtagtatattaaagtaatatattattattatgattatttatagaattattattcgttaggatgaaattttttatataagagatgaagttcgagagaaaagagttgaaggggaaggtttttacgaggagatagtaatcgaattgtagcgtttcggttagtagtatatatagtaggtacgcgtttagtaattttagacgttgcggagtggagtttaagtatttttttaagaatcgcgaaatgatagatattatcgacgtcgatataattgtacgtaaggtattttagttcgcgttttaaatttttggaggattcgtcgattatatcggatgtgttgtttgcgtatgcgtattttcgtgatttaatttcgtttttttcggtgtgttaatttgcgtaggcgttgaggtcggttagggcgcgtaataattaatgcgtagacgcggattgtattaatagatttaattataatttagaaaagttaatgcgtttgcgtaatggttttattaatgagttggggacgtgtattttttttgttttgttttcgttcgttagttcggtgacgtttatagttgttttggtaataagatatattgggaggaagaggggaataagttttattggggatcgcgtagttaattagaggtattcggttttttttggtttttttgagttttggaagatttaacggtttgtatttattttgaggtaatgtttggcgtttttggggtttgatattagtttgattttaattttgttaagggcgttgtttgtagatgtttgttatagattattggaataagttaagtttattcgtagtgagattcggcgcggttaattattgtataggttttagtttagatttaattatttgggggagtgagtgggtgtggtgaggggcgggaggtagggaggaagtttgattttagtagggttttgaattggaattcgggatttggttttgtaatgttaatatttattgggcgtttttttggggtttgacgttgtattaatttgtagggatttttacgtgaattagatatatttgtagttttaaaagagttggtgaagggagggatagttgtcgaatgtcgtgtaaaaagtatatggttaagtttagtagtttttttttcgtaagttggtattttgaatttggtgtaatatttcgggatgttagcgtcgaaaggttcgaaagagtatgtttggtttaattttattttttttaatttattttgtagaagaaattgaaatggttttaggttttgtattttaataagtgggattattttgagggttttaattgtttttttttttttttttttgagacggagttttgttttgtcggttaggttggagtgtagtgtcgcgatttcggtttattgtaattttcgtttttttagtagttgggattataggtacgcgttattacgttcggttaatttttgtatttttagtagagacggagttttattattgttagttaggttggtttcgaatttttgattttgtgattcgttagtttcggttttttaaagtgttgggattataggtatgagttattgtattcggtttgttttaattttttttaagaaattaagttttggttttcgttgtttttttaattttacgtgaattcgattttttagatttagtttattttattttttagttgtaagtttttttatatatgattaggtattttatttttagttttttaatattttgaattgtacgtgagtaaaatttttaaaatagtaggtgaataatagcgtttttgtttttttattttttttttttttttttttgagatgaagttttgtttttgttatttaggttggagtgtagtgaatggtgcgatttcggtttattgtaatttttattttttgggtttaagttatttttttgttttagtttttcgagtagttgggattagaggtatttgttattacgttcggttaatttttgtatttttagtagaaacggggtttcgttatgttggttaagttgattttgaatttttgattttaggtgatttgtttgttttagttttttaaagtgttgggattataggagtgagttattgcgtcggtttttttttattttttatttgtttttagattggaaattttatacgtattaattaacggatgtattattagtggtgattaaagttttatttaagttttagaaagaagagaaataatttaagaaatttttagagtttatttgaatagatagatttatatttatattcgtggagatttgtgtagttatatgaatataagtttagtttaaatttatgttgttgagaaagaaaaaaaaagagtggataataagttggtttttattttaatataatatggtaggaagtattaatttttttgataagttgaatttttttttttgttttattaataagtaggagggtagtttttttacgaatatttaattttaaattttataggttaggttgatgttttttaattatttaggtgtggattttttagggagtttttgttttattagttaggttttttttagtgtttttttttttatgttttgtttgtttttgatttatgttaattattattattaagatttttttaggaatttttataggagagaagaagagatgaaaaatattaaatggatttattgaatgtatttgtttttgagatttgttagttatattaatatattatattagggtttttttgaattatttaaaatagtaagaaaaggtttatttttttatttagtttatgattttataattattgaaatatttttaattgatttgttaataggaaattgttaatattagtgttgattttaattagtttaaattagaatattaatatagtttaaaatttttgtttagagtagtggataagagtgtaagttttagaattagatagttttaggtttgaattttgattttgttgtttattagttgtttaatttggaataagttatttagtttgatagttttattttttttttttataaaatagaaataataatatttggtttattgaaattatgtgaggattaaatgagataatgttaagtattaagttgttagtatagtgtttggtagatagtaaatgtttagtaaatgtttgtttttattaattattattaattttagtaattaattatgtttgttttttttagttttttgaatgattaaaagttagttaaattatagcgtttttaataatttgggtatgtaaaagatagtattggagggattgtaatttaaatggtttttaaagggtagatttaatttataagttgaaattgaagttagagtatattttaggggttttattatataaaataatggaagagtggaggagtaagagggtttttttaagggtaaagtttatgattttatattatatattttttataaaaagaaattatattatttattaaaagaaatataaattttttaaagtttgagtagataataatttttttaaaggaaattttcgtatggaaaagaatgttttttttatttttttttttttgtattgttacgtttgttttaagatttttttttttgtttttgttaattgttattgtatatataatttttattttttaaattttggttttagtgtgattaaaattttttttttttgttttttaatagaatagataaaataggttattatttttagaaataaaaatttaaggagaattaagttgtaaatagtataaagttaaatttttaaagtattaagtttttgattaagttttagtaaagtagtaaatatttttagtgaatttatatttttttatttttttagtttttgatgaagtggaataattttttagtttttttgtttggttttttttttttttagttgtttgggagttttaaaaaagttttagttttgtttttttgttggtattcgaaagtgagtttattatattgttttttttaagagtagattatttattataatatggggttgaaattattagtgtttgagtaatagtgtgtaatagaattttttgtgataatgtttttgtattgtttagtatagtaattgttagatatatgtggttattgagtatttaaattagttagtgttgtaatttaaatgtaggtttattttttcgttgtttgtagagtttatttaataagagtgagatttggtataaagaaaatgatattttattttaaagttattttaggggaggaagtattggttttttgttttaagggtattattttatttttggagtagaaagagggtgtttttgaaatggggtatggaatgttggtatgaatggtacgaggggaggaagcgagtggttggggggtttgtatattatttttagtgttttatttattggatagtgattgttggtgttttttgtgggtaggattgggttgtaaaagtggttaaaattttttaggtaagagaaagttttgtagtaggtatattttgggttgtagataggttgttgttttttaaggtaatttttcggtgggtgagagtttttttttggagtttttaagtatatagttagatgaatttgttttatagggagtgtttgataaagaggaggtaaaaggttataattgtatttttaaagagttaaggaggaagtgaggagaagggggaaaagaagagagattttttaaaaattattaaattattttttagaaaaatggggatatttggttatagtgtgattaaggaaattttatttggtttttatttaaatttaagtagttatttgtggttagtggttgttattggatagaataatttatgagttattttatttatttttatgtttagttaaagagatatattttgtttatagtttatttaaatggtagtgatatttatttgaaataagaataatttatagttgttaggtttgagttattagtttattagttttatttatttttggaatatttagtgatgatttatagttatagaaagagggtttgtaattttttaaggagtttattttgttcgttgtttagatagagttggtttattaagattgggtaattagaatggagaaagagtaatttatatatagttagttgtgtaggagaacggaattttattattatttaaattagtttttttaagtattcggggattagagtttttaaggataatttggttggggaagttagtgagttacgagttttgatggtcggggatgaaattataaggagttaaagttgtttttttgttttgagtttttgggtggggggcgttgtaagattagatgagttagtttattaatttgagtggtattagttgatttattaagtgtaggggttattaaatat

SEQ ID NO: 19 - DNA, 6274 bp, Artificial Sequence
  chemically treated genomic DNA (Homo sapiens)
ggattatttgagtttgggaagttgaggttgtagtgagttaaggttacgttattgtattttggattgggtaatagagttagattttgttttaaaaaaaagaaaaattttatggttttgtttatattatttatttgattttatatgttgtttattttttttattaaaatttttagtttattaattatagtttttttataattaatatttcgatgtgataatgttttagtttaattattgtggttataatagaatgttataaattgggtgatttataaataaaagaagttgatttaggttgatttagaggttggggagtttaagagtttggtgttagtatttgatgagtgtttttttgttttattataatatgggagagggtattacgtgtgaagagagtttatttttataatatagttatttttataagaattaatttatcgttatgagagttatgtgaatttatttatgaggatagcgggttaagtttttaatatatggatttttcggggatatatttaaattatagtagttagttgtaacgttcgtgttatgttttattttggttttgatgtttgtgtagtttttttaaattgcgtttttgttttttagtgtgttttgtaatgtggaaatgatatattgggtaagaggagttgtagtaaagaggtttttagtgacgtagtgataagttgtggggagagggagtgttgtatagttttgtcgtatgttatagttttttagtgagtttgtgtttttggattgtgaattttatgtttgttttttagtttttttagttttttagatggtatagaattgttggaggggggtggagttgtatattttttttgttttgggtaggttattttttgataaaatattaggttaggtttttggtgaaataattttttttgagggtagattttttattaataatagaatgttttaatttattttaaaatggttttttttttttttttattgttagaagtataatgagattttttttttaatattcgtggtaaggatttagtagagttttaggaggtaatatttttaagtgttttatattattttgtattatgattgggttttgttggagtttttaatttgtagaattgtttatattgagtttttcgtaattttttaattatagggtaaatttttttagtcggtattgggtttttggaggtttttgtttgttggtttttttttttggaggttgtgtttttgtgtttgtttgtttttttaatttggggggtagtggtttgtttaatgattttaattttttgaaagagttaagaagaggtgttaatttttcggtttgtttagttttttatttgttgttagaatggagcgttaatagtgttttttatagtgatatgtaatttttaattttagagatgatgaagtatattaatgataaaggagaaatgttttagtagttttttgttagtatattattttttgaaaaagttgttttttttatattttgtaagagatgggttttaatttagagtttaaggtaaatgattttttttaaggagaaggaataaatagttttagaaattatgaaagtttgtttttaggagtgtttttgaattttagtaggggttatatttattttgtagaaataggtgaggtatgtttttggtataaaattttaatggtatagaaggataaattgaaaaataagtttttttttaaatttttgatttcgagttatttagtttttttttttagaggtaaagttgttattagatttttgtatttttttaatatatatttttagaagagttgttaagtgaatatatgtttaagtgaaaatttattttagaagtgtatttttttaaggaattttagggttggaaggaatttgtgttagtttttaatttataatttttattagtatttattgtttttgtataaaaattttttttaaaaaagttttttttattttgatatagtttattttatttttatttagttttaataatttataaaatatatttttgaaagtttaaaatttgttattatgttttttttttttaattaatttttattttgatttttaagttagagaaaataggtggttaaatgttttttgtttaagatggaatttagaatatttgaagattttagatttttattttgttaaataacgtgttttttttttttttttatagagtatttggttttaggaaatttagagttatattttttatagataagattaaatttttatttaatatatttagaaattttttttaagaggataattatttattagaggaaaaaagttttttatgtatagttggtaaagggatggaattatttgtgttattaaaattgatagacgtttatgagatttattaagggaaatattagagttttagtatatatttgttaatatagtatatatgaaggttttatttataatttttttggttaagtagaaattttggtattatttattttaataaatttttaagatattatgaaatagaattttaggttttgatattattatttgttttaggttttgaagcgttgttggataagaggggtaaaatacggttttgttttggatttaaagttggttttttatattagtaagtatattttggtattttggttatttttttcggttatagtattatattgttataaaaggtagatataagtattaattagtttataggttattagataagtttagtttgattaatgtttaatatagtaattgggttattattgttatttttgtggtggtggtatatatatttagtttttgttcgggttatggtttaggattattttttatagaggttgtgagttagagttttaattgtgtagggttttaattatgttaggttatttattttttttaagaggattttattagtgtttgttcggttatatagttttttatttattaagtaatatagttattagtatattttaggtattagttaaggattataaaattaacgtgaatgttagtttttgtattaaaagtttaaaggagaaatttaaattttatatagatgttttatgaagatgtttagtaaatttatttttttttgttttttggaatttattttagtattgtgttatgtgtgtgtttagtaattttttataaaaagttttgttttttgtgatgttattagattatattgaagaatatataagtcgtattatgaaggttgttgttttatatagttttaacgtagtgagaattgatgtttttatatgttgtttttttgggtatttaaagaaatttttgtatagttttataaattagttgtagtttaaattgatttgtgttgtgatttgtatatataggttatatttttttgatagaaaatatagtttaaaattaaatttgtagtttttgttaagtgaatgtataggattttattgtatttaggttttttattgtaagatttatttttgtttttattttatgttttattgttgtgttttttatttgtttttttttagttttgttttttgtgtttttacggattgtttttagtttaggtgtgtaggaagtatatatatgtttgtagagtttttatggtttttgtatttagggtatgattttaacgtatagtggttgtattgatttgttaaaataaaggaatagattattttttttaatttatagggaagttttaggttgtgcgggtagtgagtagatttgtgtttgtttgcgtttgttttggtgaaaaattttatcgtttaggttgtagggtgcgagatttaggtataaatattttgttggatgaggaggaaagatgtaaggttgtttttttttagagatagtaaagggtaggtttgtagttttatttattttaggattgtgatttttgatagagtcgagagattagggttgttgaattaggtttgaaggttttagtgaatttcgtgaagagaggaggggtttggttgtaatatggatttagaggatatttttattgtaggagaaggaatagtggggatggggtggatttgttaaaggaatatagtttaagtttttgtagtttaaaaaagtttagttttttttggttaaagttttcgcgagtttttttggtattttttttgcgggagttataggggtagtgggatatttagtttttttaaaagtatttttacggttgtttgtgttaagtttttattttaagagttttatttttgcgaagtaatgtgttttatatattggttttaaagtatttatggttggttgtaataaatattaaggaggtttgtttttgtattcggagttgggtgtttttattttagatgatttcgagggtgtttgataagatttgaaggattttcggattttagagtattatttcggacgtttggtatttttgtcgcgcgggtacggcgatttttttagttgttaggttagtttttgattttcgagagggtttcgtagtgttgtaggggaggtggggattcgaataaaggagtagttttttcgtcggtgttattattcgacgttggttttaaggttcggttagtttgtttaaagttggtataagtttgttttgtaaaataaaagaagggaaagggggaaggggattttggtatagatttggttcgatttggatataggttgggtttgtaagttcgcggggatcgggtttagaggggtagtgttgggaacgtttttttcggaaattaattttttagggtattcgttttttttttatgcgtcgttttattttcgtcggagattaggtttcgcgggggttatcgttgtttatcgttttcggcggtcgttggttttgggttttcgttgttggtttttttttttttttttcgtatttttttttttttttgtttttttcgatttttttttcgtcgtttggtttttttttttttcgttttgttttttcgcgtttcggttcgcgcgagttagacgttcgggtagttttcggcgtagcgcggtcgtagtagttttcgtttttcgtacggtgtgagcgttcgacgcggtcgaggcggtcggagtttcgagttagtttcggcggtcgtcgtcgtttagatcggacgataggttatttcgtcggcgttcgttcgagttttcgtttcgtcgttaacgttataattatcgcgtacggttttttgatttcgtttagtattgatcgggagagtcggagcgagtttttcggggagtagcgatgcgatttttcgggacggtcggggtagcgtttttggcgttgttggttgcgttttgttcggcgagtcgggttttggaggaaaagaaaggtaagggcgtgtttcgtcggttttcgcgtcgttttcggatcgcgtttcggatttcgtagttcgtttaatcgcgtatcggcgtatcggttcggcgttcgcgttttcgttcgtttttttttgtttttttgagattagttgcgtcgtcgatcgggatcgcgggaggaacgggacgtttcgtttttcggtcgggagagtttggggcgggcggaggaggagacgcgtgggatatcgggttgtaggttaggcggggaacggtcgtcgggattttcggcgtttcgaatcgtttttaattttttttttttatttttttcgtttagttgcgtaggatcggcgttagtgggcgaaagtcgggtgttggtgggcgtttggggtcggggtttcgtacgtgcgtttcgcgttgtttttttagggcgcgacggggttttggcgcgtattcgaggggcgggcgttgtttattcgtcgagattgtattgtttagggaagttgaggaaggaatttaaaaatatagttttttttcggatttcgcgggataggcggttttttgagaggattttttcgttttcgtttttcgcgtaggttttaaattgaagtcggcgttcgttagtttggtttcggtttttttttaggttttcgcgattttcgttttttagtgtggagtcgtagtttcgatttgggagttgggagaattcgtttattattatttgcggttttcggggaggggtggtgttggcggcggttagttttttcgttggtaaaaggtaggtggggttcgattcgttttttgggcgtagatttcggtcgttcgtttcgttcggtgcgttttcgttttgtttatttaagagtgttttttatttttcggggattttagtttttttttgggcgttcgcgtcgaaagttttaggttttttttcgatggtcgtttcgcggagacgttcgggtttgttttatttgtagtttttcggtcgcgtttgggtttcgcggtggagcgggacgcggttgt

SEQ ID NO: 20 - DNA, 6274 bp, Artificial Sequence
  chemically treated genomic DNA (Homo sapiens)
atagtcgcgtttcgttttatcgcgaagtttaggcgcgatcgaagggttgtaggtggagtagattcggacgttttcgcgaggcggttatcgaaggagagtttggggttttcggcgcgggcgtttaggagggagttggggttttcgggaggtggggggtatttttggataggtaagacgagggcgtatcgggcgaggcgagcggtcggggtttgcgtttaaggggcgggtcggattttatttgttttttgttaacgaggaaattaatcgtcgttagtattattttttttcgggagtcgtaggtggtggtagacgagtttttttagtttttaggtcgaggttgcgattttatattggggaacgaggatcgcggggatttggagaggggtcggggttaggttggcgggcgtcggttttagtttgagatttgcgcggagggcggaggcggggaggtttttttagaaagtcgtttgtttcgcggggttcgaggggaggttgtatttttgggttttttttttagtttttttaaatagtgtagtttcggcgggtgggtagcgttcgtttttcgggtgcgcgttaggatttcgtcgcgttttgggaagatagcgcggggcgtacgtgcgggatttcggttttaggcgtttattagtattcggttttcgtttattgacgtcgattttgcgtagttgggcggggaaagtgagggaagaaagttgggagcggttcggggcgtcggaggtttcggcggtcgtttttcgtttggtttgtagttcggtgttttacgcgttttttttttcgttcgttttagattttttcggtcgaagaacgaaacgtttcgtttttttcgcggtttcggtcggcggcgtagttgattttaaggaaataggaaaggacgggcgggggcgcgggcgtcgagtcggtgcgtcggtgcgcggttgggcgggttgcggggttcggggcgcgattcgggggcggcgcgggagtcggcgagatacgtttttatttttttttttttttagagttcgattcgtcgggtagagcgtagttagtagcgttaggagcgttgtttcggtcgtttcggagggtcgtatcgttgtttttcgaagagttcgtttcggttttttcgattaatattggacggagttagggggtcgtgcgcggtggttgtggcgttggcggcgaggcggggattcgggcggacgtcgacgaggtggtttgtcgttcggtttgggcggcggcggtcgtcggggttagttcgggatttcggtcgtttcggtcgcgtcgggcgtttatatcgtgcggggggcggaggttgttgcggtcgcgttgcgtcgggggttgttcggacgtttagttcgcgcgggtcgaggcgcggggaggtagggcgggaggaggagggattaggcggcggaggagggatcgggaggagtagaggaggaggagaatgcgaggaggagggaggagaattagtagcggggatttaaggttagcggtcgtcggaggcggtggatagcggtggttttcgcgggatttagttttcggcgggagtggggcggcgtatgggaggggagcgggtgttttgaggagttaattttcgagaggggcgtttttagtattgtttttttggattcggttttcgcggatttgtaggtttagtttatgtttaggtcgagttaaatttgtgttagggtttttttttttttttttttttttttgttttataaagtaaatttgtattagttttagatagattggtcgagttttagagttagcgtcggataatggtatcgacggggaaattgtttttttattcgggtttttattttttttgtagtattacgggattttttcggggattagaggttggtttggtagttgaggaggtcgtcgtgttcgcgcggtaggggtgttaggcgttcgaggtggtgttttaaagttcgagggttttttagattttgttaagtattttcgaaattatttgaaatgagggtatttaatttcgggtgtagagataggtttttttaatgtttattgtaattagttatgggtattttgaagttaatgtgtgaagtatattatttcgtaaaagtgaagtttttggaataaaggtttgatataaatagtcgtggaggtgtttttagagaggttaagtgttttattgtttttgtagttttcgtaggagaaatgttagggaaattcgcggaagttttggttaaaagaaattgagtttttttgggttgtaggaatttgagttatatttttttggtaagtttattttatttttattgtttttttttttgtagtaaaaatgttttttaggtttatgttatagttagattttttttttttttacgagatttattaggatttttaggtttggtttaataattttgatttttcggttttgttaaaaattataattttgaagtaagtgaagttatagatttgttttttgttgtttttgaaggggagtaattttatattttttttttttatttagtaaaatgtttgtgtttgggtttcgtattttgtagtttgaacggtggggttttttattagggtaagcgtagatagatataggtttgtttattgttcgtataatttggaatttttttgtgaattaggagaagtaatttgtttttttgttttaataaattagtatagttattgtgcgttgaagttatgttttgaatgtagaggttatgaaggttttgtaggtatgtgtgtgttttttgtatatttgggttgagagtagttcgtagaaatatagaaaataaaattagagaaaggtaaatgggaagtataatagtggaatataaaatgaagataggagtgagttttataataaaagatttgaatataataaagttttgtgtatttatttaataagggttgtaaatttggttttaaattatattttttgttaagggaatgtgatttgtgtgtataagttataatataaattaatttaagttataattgatttgtaagattgtataggaatttttttgagtgtttaaaaagatagtatgtaagaatattagtttttattacgttaggattatatgagataatagtttttatagtacggtttgtatattttttaatgtgatttgatagtattataagaaatagagttttttgtaaagaattattagatatatatatagtataatattgggatggattttagggaatagagaagaatgggtttgttgaatatttttatgggatatttatgtaaagtttgagttttttttttgagtttttgatataaaagttgatatttacgttgattttgtagtttttggttagtatttggagtgtgttgataattgtgttatttggtaagtaaaaaattgtatggtcgagtaggtattaatgaagtttttttaagagagataagtagtttggtatagttagggttttgtatagttagggttttagtttatagtttttgtggagggtggttttagattatggttcggatagaggttgggtgtgtgtgttattattataggaatgataatagtggtttagttgttgtgttaagtattggttagattaagtttatttgataatttgtgagttggttaatatttgtatttgttttttatagtaatgtgatgttgtggtcgggagaagtgattaggatattaaggtatatttgttagtatgagaggttaattttgaatttaaggtagagtcgtgttttattttttttgtttagtaacgttttaaaatttgagataaatggtgatgttaggatttaaaattttattttataatgttttggaaatttgttagggtgagtaatattaaaatttttgtttggttaaaaaaattatagataaagtttttatgtatgttatattagtaagtatgtattaagattttagtattttttttaataaattttataagcgtttgttaattttaataatatagatggttttatttttttgttagttgtatatgagaaattttttttttttgatgagtggttatttttttagaagaagtttttgagtatgttgaataagagtttagttttgtttataaggaatgtggttttgaattttttaaaattaaatgttttgtgaaaggggaggagaaatacgttatttggtagggtgaagatttgaggtttttaaatattttaagttttattttaggtaaaaggtatttgattatttgttttttttggtttagaggttaaagtaaagattgattaggaaaaaaaaatatagtggtagattttagatttttaaaaatatgttttataagttattggagttaagtaaaagtagaataagttatgttagagtggaaagggtttttttgagaaagatttttgtgtaagaataataagtattaatggaggttgtgaattaaggattgatataggttttttttaattttaaagttttttaagaaaatgtatttttaaaataggtttttatttaaatatgtgtttatttgatagtttttttaaggatatatgttaaggagatataagaatttggtaatagttttgtttttagggaggagaattaggtagttcggggttaggggtttagagggagatttgttttttaatttgtttttttgtattattgggattttgtattaggagtatgttttatttatttttgtaaggtaagtgtggtttttgttgaggtttagggatatttttgggggtaggtttttatggtttttgagattgtttattttttttttttgaaggaagttatttgttttgagttttgagttgagatttattttttgtagaatgtggaagaagtagtttttttaaggggtaatgtgttgatagaaaattgttgaagtattttttttttgttattagtatgttttattatttttagagttgagggttatatgttattataggaggtattattggcgttttattttagtaataagtagaaagttgagtaaatcgaaaaattaatatttttttttagtttttttagagaattgaggttattgggtaaattattgttttttaaattggagagataggtaaatatagaagtataatttttagaggaagaaattagtagatagaaatttttaaggatttagtgtcggttgggaaagtttgttttgtaattgagaaattgcgggaggtttagtgtgggtagttttgtaaattaagaattttagtagagtttagttatggtgtagggtagtatgagatatttgagagtgttattttttggagttttgttaggtttttattacgaatattagggggaaaattttattatgtttttggtagtggaaggagaagaggaattattttgaaataggttggaatattttattattaatagaaggtttgtttttaggagaaattattttattagaggtttaatttggtgttttattagagggtgatttatttagagtaagggaaatatataattttatttttttttaatagttttgtattatttaaggggttggggaagttgagaagtaagtatgaagtttatagtttagggatataggtttattggaagattgtgatatgcggtaggattgtgtaatattttttttttttatagtttgttattacgttattagaagtttttttattatagttttttttatttagtatattatttttatattgtaaggtatattaaaaggtaaagacgtagtttgaagagattgtataagtattagaattagaatgagatatgatacgaacgttataattaattgttgtggtttgaatgtgttttcgaaaagtttatatattggaaatttaattcgttgtttttatgaatgaatttatatggtttttatggcggtgggttaatttttgtgggagtggttatgttataagagtaagttttttttatacgtgatgtttttttttatgttatgatgaagtaagaagatatttattagatgttagtattaagtttttggattttttagtttttaaattagtttaaattagttttttttgtttataaattatttagtttgtggtattttgttataattatagtaattggattaagatattattatatcggagtattaattataaaaaaattatgattaataggttaggagttttaatggaaaaaataggtaatatgtaagattagatggataatgtaagtagagttatggaattttttttttttttgagatagggtttggttttgttgtttaatttagagtgtagtggcgtgattttggtttattgtaattttaattttttaggtttaggtgattt

SEQ ID NO: 21 - DNA, 5312 bp, Artificial Sequence
  chemically treated genomic DNA (Homo sapiens)
gtcggtttcgggggtcgacgatttttcgggtaggcgacgtgttttgtttaggttttatttttcgcgttcgtaaaacggggtggataacgtagtttaaggtagagtcgcgttaaggtttttcgttgtcgtcgggttttggcggtttgatcgggtttggggttcgagcgtgttttcgggtttgggggggtcgtcgcgatggattcgttggtagcgttttaggatcgtttggtggagtagttgttgtcgtcgcggatttaggtttagaggcggtttaaggtgcgtgtgtggagagggcggaacgtgggtttgtgatttcgcgggtttcgggattcggtatggggttttcgttttcgcgcgttacggttcgttagcgtttaggtttagttttttttttcgtagcggtttcgtaggttcgcggttttacggtggggcgacgtgttttgtttaggttttattttacgcgattttaaaacgcggcggagaatgcggtcgtgggatttttttaggggttttaagggtttgcgggggttgggcgtttgggcgcgcgggcgggggaggttcggcgtcgcggtttataaataggcgttgtttcgttatcgtcgttgtcgtcgttttcgcggttggattcgggttaggtggggtttttcgttttttggtatttttcggaggggtgagtgtcgaggtttttagttttttcggtttatggagggttttgagtgtgttttaggggttttaattttgttgttttttgttcgaggagggaggatatcgtttgtgtttgttgcggtttgatatttttttacggaataaatatagtgtcggtttttgtagagttttttttgggattggggttaggggtgtttttttttgttattatttcgtttgtttttttatttttaggtttttgtttacgggttttttttttatttttgttaacgaaatgttttattttgggaatcgtattttttgttgtttttttatatcgtatttggtaagagatagggtattgggtttttggagaaatttttgtgtttttattttgttttattttgtttttaggatattgataagtagtacgtgggtttcgttatattgtttaattaggtgtatcgtaagtcggtgaagaaaggttttgattttatatttatggtggttggtgagtgggttaggtttttcgggggagtggttggggttattggttagttaagttttgtcgttggagttttagatttaacgtagttttttttttgtatttgtgtgtaggtgagttaggtttggggaagtttatattggtttatagtttttttttgatagatttgtataaggatcggaagttgtttagtgttgagggtgagtggtttttaggaggttttggtattgatttttagtttttttttatgggatttttttaaggatttttttttaggtttagtttttattgttttgttttcgcggtgtgggttttttgggggtagggttaaggtattaagatggatgaggacgagggttttggttgttaagggtgaggggttgagggttggagaggtttttttagtggtttttttttcgtagagcgtattagttagacggtagagattttaaaatatacggtggatattgaggagaagggagttaagttgaagtttattatcgtggatacgtcgggattcggggacgttgttaataatatcgagtggtgagtgaggtttgttgagaaaggttttgtttaggcggttatagtattcgaggtttggttttattttttttttgtttatagttggaagtttattatcgattatgtggattagtagtttgagtagtattttcgtgatgagagcggttttaatcgaaagaatatttaagataatcgagtgtattgttgtttatattttattttttttttcgggtatgggtgtgtggttgttttggggttaggttcgggagtgtagtttttataatatggttttttggttgtgtttatgtttatttttggttgttttcggtaggttgcggttagtggatgtgggttttatgaaggtattgtatgagaaggttaatatcgtgttttttatcgttaaagttgattgttttgtttttagtgagattcggaagttgaaggagcgggtgagtttgtcgtcgtataggggtttggttagggttttggggttgagagtattagggggatttgtttggttttaaatttgatggtttttgttttattatagattcgggaggagattgataagtttgggatttatgtatattagttttttgagtgtgattcggacgaggatgaggattttaagtagtaggatcgggaattgaaggtgaatatgtagattggtggggtaggggggatggagttggtgaggggtagaattagagggttttgttttttttatattgagtttgttggaggagggttaggttagtttagttgggtgtaagagttatttgttttaggagtagaggatttgtattttttttatttagggttagaaggtaaaggttattatgtttttgtttggttggggtgggttatgtgggtttcgtgtggtgtttggtaggtatggagtatttgtttagatttagaggtgtagtagtgggttaggtttttaattttaattttttttttatgggttattagaggaaggggttgttttagtggtatattttggtttttagatttttgagttttagggttggtggttttgggtgtttcggtagttagagtgatgatggagattatgttaggggtaggtggttattagggtaggggtattagtatggggagatataggtttagttttggggagggaaggggtagttggagggggtggtttttgatgagggaggagatgaggagggagtatgtttggttgggtatagtttggaaaggttttggaatgtgagttatatgggttttggttttagttaggggtagagaggttagaaaggggtaacgttaggatttttttgaggagagatagttgatggtgatgttggaggggtgtttcgggagttatatgttcgttttttattagtaatcgtgtaattacgtttatcgggtgtgagttttttttttttttttttttaggagagcgcgtttttcgtcgttataggtagtaatacggtggtggaggttaaggggtagcgggttcggggtcgattgtatttttgggggatcgtggagggtgagtagagttttggggtattaggtttggtgggggaaggttgttttgggtcggcgttagtttattatttatttttatttcgtagtggagaattaggcgtattgcgatttcgtgaagttgcgtaatatgtttattcgtacgtatatgtacgattttaaggacgtgacgtgcgacgtgtattacgagaattatcgcgcgtattgtatttagtagatgattaggtgcgcgttttagtcgcgagttagatttcgtttttttggtttcgtttacgtttttataattgagggtcggttttgttagtttatttagatttgaattttgtattattttttaagtttttttttttttttagagtttggtttttttagaattaagtttagggttgtgagggtttcggagggtagggttttagtagtggcggggatgggttaggtatcgttagtttacgttgagtttttcggtggcgtcgtttcgtttattttttttttcgtttcgcgtagtaaattgatttaggatagtcgtatggagagttttatttcgattttgtcgttgtttatttcggacgtcgagattgagaagtttattaggatgaaggatgaggaagtatgtggggcggcgggggcggcggaggcgggcgttagggatgttttttcgcggtgttgtttattcgtcgggttgttttcgttcgtagttgaggcgtatgtaggagatgttgtagaggatgaagtagtagatgtaggattagtgacgttcgtcgcggatatatcgttcgttttcgggacgttttcgtatttttggatattagatcggattgttttcgattcggagacgcggggttatagtttttagttgattttaatttatttttagtattatttttttttaggttattgtgtttgttttcgaggggtttggatcgtagttttcgtttagttggttttttttgattttgggggattaggagcgaagttgggcgggattttagagattcgttttttttgtttttttttcgttttcggacggttatagtatttaaatcgtaggttttgttttggtaggtaggtaaagttaggtagaagaggatttttaggattttgggtttgttttttgttttagtgttgtagaacggatttgggagtttttttttgtttgttttcgcgggttatttagcgagtgttgagattttattttttgtcgaggcgggtcgagtttttttttatttttagacgtttagcgggtagggttgggttgaattaaatgggagttttttagatataaggaggttagaggttgtaaggagcggggtcgtgatcgtttatattttttttttatagttcggttcgatttggagggttttcggggtattgggcggtgagttattttttggtaattttcggtgtcgttttttgttttcgttcgaggttttttttttttagtatcgttgtggtgtgtcgggattttgagtttaggtttttcgatgtttttattcgtatgattttttttcgttatacgatgtttcgttttttttcgttgtgaatgtcgcgttttgttttggtgataggagaataatgttggtgaacgtcgtagcgggtgttcgagtgtttcgtgtgtttttgagagcgggtgggagcggaagtttgagcggtttgcggttttcggcgatagtgtgttatttgtcgttgtagcgcgcgttcgcgcggtttttgggttatttttggttaggtcgtagtattgtggtcggtgcgggcgtggtaggggcggggcggttttatcgttcggttttttcgtttacgtttttcgttgtagagtaagtcgggttgtcgttttttcgttatgggtttcggtgagtttggagttcggtcgggttttcggttgttttttaggtcgattcgggttgagaggagttttggtcgtttggttgtagttgggagagatttgggttagatttagaggggatttttagtcggcgtgcggggtggttagggtggagaggttggcgggttatcgggacgtcgggtattaggggttggatggagtcgggtcggtagtttgggtatttagagatgtcgtttaggtgttcgtcgatcgttcggtttattgcggcgttttttttgtagg

SEQ ID NO: 22 - DNA, 5312 bp, Artificial Sequence
  chemically treated genomic DNA (Homo sapiens)
tttgtaagggaagcgtcgtagtaagtcgagcggtcggcgggtatttgggcgatatttttgagtatttagattgtcggttcggttttatttagtttttgatgttcggcgtttcggtagttcgttagtttttttattttgattatttcgtacgtcggttggaagttttttttaagtttgatttaagttttttttagttgtagttaaacgattagagttttttttaattcgggtcggtttagggagtagtcgggggttcgatcggattttagatttatcggagtttatggcgagaagacggtagttcggtttattttgtagcgggaggcgtaggcgggagagtcgagcgataaggtcgtttcgtttttgttacgttcgtatcgattatagtgttgcggtttggttagaaatagtttagaggtcgcgcggacgcgcgttgtagcggtagatagtatattatcgtcggaggtcgtaggtcgtttaggttttcgtttttattcgtttttaggggtatacggagtattcggatattcgttgcgacgtttattaatattgtttttttgttattaggataggacgcggtatttataacggaagaaaacggagtatcgtgtggcgggaagggattatgcgggtgggaatatcgggaggtttaggtttaggatttcggtatattatagcggtgttggggagaagaggtttcgagcgagggtaggggacggtatcgagagttgttaggaggtggtttatcgtttagtgtttcgggggttttttaggtcgggtcgggttgtggagaaggggtgtaagcggttacgatttcgttttttgtagtttttggtttttttatgtttggagggtttttatttgatttagtttaattttgttcgttaggcgtttggggataagggaagattcggttcgtttcgatagaaaatggggttttagtattcgttgggtgattcgcgggagtaggtaaaggagggtttttaagttcgttttgtagtattggggtagggaatagatttaggattttgggaatttttttttgtttagttttgtttgtttgttagagtagggtttgcggtttgggtgttgtgatcgttcgggggcgggggaagggtaagggaggcggatttttgaagtttcgtttaatttcgtttttgattttttaaggttagagagggttagttgggcgggggttacggtttaggtttttcggaaatagatataatgatttgggagggggtggtgttgagaataaattagggttagttgggggttgtggtttcgcgttttcgggtcgggaatagttcggtttggtgtttaggggtgcgagggcgtttcggagacggacggtgtgttcgcggcgagcgttattggttttgtatttgttgttttattttttgtagtattttttgtatgcgttttagttgcgggcggagataattcggcgggtgagtagtatcgcggaggagtatttttgacgttcgttttcgtcgttttcgtcgttttatatatttttttattttttattttgataagttttttagtttcggcgttcggggtgggtagcggtaggatcgggatggggttttttatgcggttgttttgggttagtttgttgcgcggggcgggggggaggatgggcggggcggcgttatcgggaggtttagcgtgggttggcgatgtttggtttattttcgttattgttgaggttttgtttttcggagtttttatagttttggatttggttttagggagattaggttttgggggagggggggggtttagggaatggtgtaaagtttaagtttgggtgggttgataggatcggtttttagttatggagacgtgggcggggttagaggggcgaggtttggttcgcggttggggcgcgtatttggttatttgttggatgtagtgcgcgcggtagttttcgtagtgtacgtcgtacgttacgtttttgaggtcgtgtatatgcgtgcggatgagtatgttgcgtagttttacgaagtcgtaatgcgtttggttttttattgcggggtgggggtgggtagtgggttggcgtcggtttaggatagtttttttttattagatttggtattttaagattttatttattttttacgattttttaggggtatagtcggtttcggattcgttgttttttggtttttattatcgtgttgttgtttataacggcgaagggcgcgtttttttgggggaaggagggagaaaggtttatattcggtgagcgtaattgtacggttattgatgggaaacgggtatgtaattttcggggtatttttttagtattattattaattatttttttttaaagagattttggcgttgtttttttttggtttttttgtttttggttggagttagagtttatgtggtttatattttagggtttttttaggttatgtttaattaggtatgttttttttttatttttttttttattaagaattattttttttagttgttttttttttttttagggttgagtttatgtttttttatgttgatgtttttgttttggtggttatttgtttttggtatggtttttattattattttagttgtcggggtatttaaagttattaattttggagtttagaaatttgggagttagggtgtgttattggggtagtttttttttttggtgatttatgggaagagggttggggttgggggtttggtttattgttgtatttttggatttgggtaagtgttttatatttgttaagtattatacggggtttatatgatttattttagttaggtaaagatatggtgatttttattttttagttttggatgaagggggtataggttttttatttttagaataaatgatttttgtatttaattgggttgatttggtttttttttagtaggtttaatgtgaaggagataaagttttttggttttgttttttattagttttattttttttgttttattagtttgtatgtttatttttagttttcggttttgttgtttgaagtttttattttcgttcgagttatatttagggaattggtatatatggattttaaatttgttaattttttttcggatttgtggtggggtaaggattattagatttgaggttagataagtttttttggtatttttagttttagggttttggttaggtttttgtgcgacggtaggtttattcgtttttttagttttcggattttattggggataagatagttagttttggcgatgagaggtacgatgttgatttttttatgtaatgtttttatgaaatttatatttattggtcgtagtttgtcgagagtagttaagggtgggtataggtatagttagggggttatattgtaggggttgtattttcgagtttggttttaggatagttatatatttatgttcgaagggggagatgaagtataggtagtagtgtattcggttgttttggatgttttttcggttgaggtcgtttttattacggaagtattgtttaaattgttggtttatatagtcggtgatgggtttttagttgtgggtaggagggaggtgaggttaggtttcgagtgttgtggtcgtttaggtaaggttttttttagtaggttttatttattattcggtgttgttgatagcgttttcgaatttcggcgtgtttacgatggtgagttttagtttgatttttttttttttaatgtttatcgtgtgttttagaatttttatcgtttggttgatgcgttttacggggaaggggttattggaagggtttttttaatttttagttttttatttttggtagttaggattttcgtttttatttattttggtgttttggttttatttttaggggatttatatcgcgagaatagaatagtgggagttggatttgaaagggagtttttggagaggttttatggaaggggattggggattagtgttagggttttttgggggttatttatttttagtattgagtagttttcggtttttgtataagtttgttaggaagaggttgtggattagtgtggatttttttaggtttgatttatttgtatataggtatagagaaggagttgcgttaggtttggggttttaacgatagagtttggttggttagtgattttagttattttttcgaggagtttggtttatttattagttattatgagtgtgaagttaaagtttttttttatcgatttgcggtgtatttggttgggtagtgtggcgaagtttacgtattgtttgttaatgttttggggataggatggaatagggtagggatataaaggtttttttagaagtttaatattttgttttttattaaatgcggtatgaggagatagtagagggtacggtttttagggtggggtatttcgttggtaaaaataaggggagggttcgtgggtaaaagtttggagataagaaggtaggcgaggtggtggtaggagaaggtatttttggttttaattttagggagggttttgtagggatcgatattgtatttatttcgtggggagatgttaggtcgtagtaggtataggcgatgtttttttttttcgggtagagggtagtaggattgggatttttgggatatatttaaggttttttataagtcggagaagttgggggtttcgatatttattttttcggagagtgttagggggcgggaggttttatttggttcggatttagtcgcgggggcggcggtagcggcggtggcggagtagcgtttatttatagatcgcggcgtcgagtttttttcgttcgcgcgtttaggcgtttagttttcgtagatttttggggtttttggaggggttttacggtcgtatttttcgtcgcgttttggagtcgcgtgaggtgaggtttggatagggtacgtcgttttatcgtggggtcgcggatttgcgaggtcgttgcggagggaagggttgagtttaggcgttggcgggtcgtggcgcgcggggacggggattttatgtcgagtttcggagttcgcggggttatagatttacgtttcgttttttttatatacgtattttgagtcgtttttgggtttgggttcgcggcgatagtagttgttttattaggcggttttggggcgttgttagcgagtttatcgcggcgatttttttaggttcgggggtacgttcggattttaggttcggttaggtcgttagagttcggcgatagcgagggattttggcgcggttttgttttaggttgcgttgtttatttcgttttgcggacgcgggaagtgaggtttggatagggtacgtcgtttattcgggggatcgtcgattttcgaggtcgat

SEQ ID NO: 23 - DNA, 6352 bp, Artificial Sequence
  chemically treated genomic DNA (Homo sapiens)
agggtattttatatttagagttttttttggtttaatagttataggtggtttgtggttattgtataggatagtatagtttttgaggaaggggattatgttttgtttttttgtgtttttagagtagtatatagtgtttaagttatattaggtgttttataaatatgtatttaatgaagaatattttttaatatttatttgaatttgttatgttttaaagaatatgatagatataattttattttaaagttagtattttagataatttagaataattggatttgtgttatttttaaaggatattttagtaagtttttgtcgaatttgtgtttgttttattattagattttagttttaataatagtatttttttttagagttagggttatttattttatttatttttatttgttattattgatttatttatttaataacgtgttagcgtttagggggaaaaggaagattgtgtaataaagatttaattatttatgatttttttttataggttttttttatttaggagggaatgtggattatatatatatattttaagaaaataaataatgaggaagttttggtgagattgaaaggtgttttgaattgggttgtttgttggttgtggttatgagaaggtttttggaattttttgtttttgttttttcggtgttggttttgagtaattattgtttgttttttgttgtaaaaaacgatggtaagattttgattgtttgtttagttgttgaggggtgggtgagaaaatttaagttgaaattttgttggagtgggaggagttggggattgttttagttattgttttttttgttattttagttattagtgttttttacgttttttagtgtttttattttgaagttttgatttgaagtgatatttaaagggtagtgattatggttttgcgttggtttaggattttagttggtttttttttttttttatatatatgatattaatatagatggttattagtgggttaaaataatatttttagggagtgtcgatattttaaaagaaaaatagtaaataggattatttatgtttttgaaagaagtggtagaaaatatagattagtcgtttaaaatgagtattaaaagtgtattttaaaagttagaagttattataatatgaaaaaatagagaatatagggaaaatatttagaagttttaggtgtaaaaaatatatataatagttaaagtaaaagttatattaatgggataaatagtgggagagatgtaattgaaaaataaaatagaaagatggaggattatattgaggagttagtttagaataaaagagggaagaattgagaagttattaatagaaaagttaggggaaaaggaggagagaattatttaaatatagattatatgagttttataaagataaaaaatagaggagaaaaatagttaaagaaataaaaagatgaatttttagaattaaaagatagagaagatttataatgttttatagagagaaggaaaaatttattttagatatattagtaaaatttaaaaatattaaagataatgagaaaattttagaagattttagtatgaaagattgatatgggattttttaattgtgatattggatgtaaaaaaaaaaatttggaatgatgttatttagaatattaaaggggaaaatattttaaatagtatgtaatatatagttaaattttatttaaaagtgttggtataattttaaaaaattattaagtatataagattttagaaggtttgttatgtaaatttttatatttgaaaggttttggaagaagaattttaattagagaacgtattttagaaggtgttaaaagatatgaaaagtaatgttgattaaataatttggtgaaggagaaaatatgtgaataaatttgaaagtatgttaaagtttttatttagttagagggaagatggagaaggtatcggtaatatttaaaaaaaaaaaaggtaatgaagattaaaaaagaaaatttggtcgggtgtgatggtttacgtttgtaattttagtagtttgtgaggtcgagttaggtagattgtttgagtttaggaggataagtttgggtaatacggtgaaatttcgtttttattaaaatataaaaaaaaaaaaaaaaaaatagttaagtatggtggtatgtatttggagttttagttattcgggaagttgaggagaatcgtttgaattcgggaagtagaggttgtagtgagttagtttagattatgttattatattttagtttggtaatagagcgagatttcgttttaaaaataaataaataaataaataaaaaaattttaaaaaatagaaatattgaaataaataaggtattataaataagtttaagtgtattaatatttataataaatataattagaatgtagtaaagatagggttatgtgtttattaaattattatatttttttgtatatataggtaacgtatatttttttattttcgtgcgtttatgtggggttattgtttattttttgttaatggaatgtgagtagagatggtaaatagtttttggtttaaaattatggaaataatgtgttttttttaggtttttttttttatttgtaaagttaggagtttatgaagtgttttttaataatagagatgtaaagtggagtttagttattttgaggtatgttttggaaaagagttatagagtgtttaatttgttttgaattatacgtggttaaaaaataaatttgtgttttgttaaattattgaggttttagtgtttgttttttgtagaaataagtttgtttattttgattattatatgaattgaatataggttagaagatagagatcgttagattgaattagaagtaaaaatttatatttatgatattttaagggttatatttaaagtataagtataaaggaagagtaaaaataaaagagtagaaaaagatatagtgaataaatatttaaagatagttgtagaatttattattattagataagatagagtaggatagaaagatttttaggataaattgggaaaaggtttagtttattaagattgtaataatttttaagagtaaatattttaataatttaaatgtagagagggtaaaagttgatttaaaaattagaaataagttgaaaaatttatagttatagttagagatttaaatatattatttataggttaggaattgtggggtatgtttatagttttagttattttgggaggttgaggtaggaggatcgtttaagtttagttgtttgaggttgtagcgagttatgattattttattgttttttagtttgagtaatagagtaaggttttgtttttaaaaaataaataaataaatgtattatttttagttatgtataggttagtttaaagataaagaaaatcgtaataaattagaatgataaaatttatatgtttgatttaataaatatgtatatgtataaaattttgtattatatttattagagtttatgtgaaatatttatagaagtttattatattttaagttatagaggattattatgtaattaaattataagttaataataaaaaatatattttaaaaaatttatgtatgtttttaaataaaaaaaaatattcgatattcgattgttattaattaaagaagtaatattttttattatgagttttttatggttttttcgttttttattttatggttttagtttttattttatttggggggaggtgaaggtggtaagggttttaattagggtaggattaaagtagtgaagatattgtttatttatgcgtaggtgttttttaggcgtttatgatgtgttaggtattacgtagatattgtggattagaaacgaaaaaattaagattagggttttttataaatcgggttatgtaaattaattattagttgttatttgattaatttgaagttagaagttgtgtttgttttatttaaaataggtattttttatttattgaggaaagagtattggagtaggttttattagtttatagattattcgagaattatttggggagtatgttgaaaatataggttttttggttttgttttggaaaggttaatttaatttattaagtaaagaggaaatttaggaatacgtattataacgaattttttaggtgatttttatttggaattagagattcgtatgattttttagttttttttaagttgaaaattatcgattttatggtttttgatatatggtttaatttggttagatttttttttatatagacgttagttttacgttgttgttgttttgttttgttttgttttttaaatatatatattggattaaatttttttagtgttttttattagtcgagtttaattagaagttaaaggtaagggtgatgtcgttttttagtttgtgttagtttggaggaggtgttcgggttttggagggattaatagagaggattagtatttttgtttttttcggggagtttacgggagttttttatattttgttttagattaaataattttaataattatatatttttttttatataatgaaattaaataataataaaagaaaaataaaataatatttttgaaagtgatttaaagttttaagaggtttttattttattgtgtagttaatgttttttttttaaagattattggtaaagtttattttattttttaatttaaaatttgtttacggaaattttttgggaaagtaggattttttgtatcgtagatggatatagagagaggatttgttggagtttagttgcgcggtgttttgacggttttttttttttttttagggggtttttttttggaggacgtggtaatagttggtttaagttttttttattttttaaaattttttttggttttttttgggggtttagtgaatttttttatttttttatttcggttttttttttttttatttagtaatagatatatttatttagagaatttttgtgattggttgaagatagaaggggtcgtttttattttcgaatttgttttttttttttttattttcgttttgtttttgtttttattatacggattgagattgatttgattaaagtattagagtgtaatggtttttagagtagggttggttttggggttttatattttgatgatttttttgagttcgtaggaggtaggggttattaagggtgagtgcgagggcgaggagggtgcggcggggagtagagatttacggagttgggttatatgaggaggtggtatggaggatgtttgtttttttcgttttttggtttatgggtaattttttttattaagagatatttaattttttttatttttgttatatttattttggatttaaatgaagatgtagttcggttagttgcgtaggtgttttagttagtttttgttgacgtttagatttttttttattttttttttttttttgagatttaaatttttatttaatagatgttagtaagtattttgatttttttattatttttggtttggaatgtgttcgattaagtttagttttgttgtagtatttatgtttatgtcggtagttaattatttatttgtttttgtttttcgggagatatgagttggggtgcgggtttatagatggtttatttttttttttttttatttttttggttttttattgtgttgggtgtatgttagttttttaataattgttgtttaaataattttatagagttttataagaattaaaatttaatttttaatttttagaaaattagataatagttatggaagagttatatttagttataatgttttgagatggaggaattgggatatgaattttgatttttgatttttcgtttagtgttttttgtaatgttttgagttgtttttttttatttttttggtttttgggttattaattttaatttttatttttgttagtcgtggtttgtttttttttatatttatttgtattgtatttttgtgtaaagttttatatttttttgtttttaattatttttttttattttatttttatagttttattagtttataatatagggtttgataatatagttagggtagatgattatagttaagatttaaattttggaattttaagtatgattttaggtagttttttttttttttattttgatatgttagattgtattgtttttgtgtcgattgtagtgtgttgggatgagtttttttttttttgtttttttttttttttttttttttagggttagtttagtgttagaataggattttgtttttatatagaatttaggacggggtttaggtttagggatttaataattatatattgtggatgagatagatatatttttttttttttttttgattttgaattcgttaaatatagt

SEQ ID NO: 24 - DNA, 6352 bp, Artificial Sequence
  chemically treated genomic DNA (Homo sapiens)
gttgtgtttggcgagtttagggttaaggagagagaaaaaaatgtgtttgttttatttataatatgtgattgttgagtttttgagtttgggtttcgttttgggttttgtgtggggatagagttttgttttgatattgggttggttttgggagagagaaagggagagagaataggaagaaagaggtttattttagtatattgtagtcggtatagagatagtgtagtttggtatattaggatgggaagaggagggattgtttaaaattatgtttggggttttagaatttaaattttggttgtggttatttgttttggttgtgttgttaggttttgtgttgtgagttggtgggattgtgggggtgggatgaggaggaatgattaaggataggagagtatggagttttgtatagagatgtagtgtaggtgggtgtgaggggaaataggttacggttggtaggggtaagaattaaggttagtgatttagagattaaggggatagggagaggtaatttaaggtattataaagagtattggacgaggagttagaagttaaggtttatgttttaatttttttattttagagtattatgattgagtgtggtttttttataattgttgtttagttttttggaagttagggattaagttttaatttttgtagaattttatgaagttgtttgagtaatagttattgaggaattagtatgtatttagtataatggggggttagggaaataaaagaaaaaaaagatgaattatttgtagattcgtattttagtttatgtttttcgaagaataaagataggtaaatagttaattatcggtatgggtataaatattgtaatagaattggatttgatcgggtatattttaggttaggggtggtagagaaattagggtgtttgttggtatttgttgggtggaggtttgggttttaggaaggaggaaggaatgaggagaaatttgaacgttagtaaaggttgattggggtatttgcgtagttgatcgagttgtatttttatttaggtttagagtggatgtgatagagatgagggggattgggtgttttttggtgaaggaagttgtttataaattagagagcgagaggaataagtattttttatgttatttttttatgtaatttaatttcgtaaatttttgtttttcgtcgtatttttttcgttttcgtatttatttttggtggtttttgttttttgcgggtttaggagggttattagggtgtggaattttaggattagttttgttttgagggttattatattttggtgttttaattaaattagttttagttcgtgtggtgaggataggaataaggcggaggtaaagaagaagaaaatagattcgaggatgggggcgattttttttgtttttagttaattatagaaattttttgagtgaatgtatttgttgttgggtaaagagggaaagagtcggggtgagaaggtggaaggatttattgggtttttaggagaggttaaaggaagttttggaggatgggaggggtttggattaattattattacgttttttaagaagggattttttgaagagagagaaaaggtcgttagagtatcgcgtagttgagttttaataaattttttttttatgtttatttgcgatgtagggaattttatttttttaagaagttttcgtggataaattttgagttagaaagtaaaataaattttattaataatttttaaaaggaaaatattggttatataatggaataaaaattttttaaaattttaaattatttttaaaaatgttattttattttttttttattattatttaattttattgtgtaagaaaaaatgtgtaattgttggagttgtttggtttaaagtaaagtgtaaagagttttcgtggatttttcgaggagggtagaggtgttggttttttttgttggtttttttaggattcgggtattttttttaggttgatataggttggaggacggtattatttttgtttttggtttttggttgggttcggttaataagaggtattgggagaatttagtttagtatatatatttaaaaaataaaataaaataaaataataataacgtaaagttaacgtttgtgtaaagagaaatttaattaaattaggttatgtgttaaagattatgaaatcgatgatttttaatttggagggagttaggaaattatgcgggtttttggttttaaatgagaattatttggggggttcgttataatacgtgtttttgagttttttttttatttaatgggttagattagtttttttaaggtagggttagggaatttgtgtttttagtatgttttttaggtggttttcgggtagtttgtggattggtaaaatttgttttaatgttttttttttaatgaataagggatgtttattttaagtggggtagatatagtttttgattttaaattaattaaatgatagttagtaattgatttgtatggttcggtttatggggagttttaattttagttttttcgtttttagtttatagtgtttacgtaatgtttagtatattataggcgtttaggagatatttgcgtatgaatgaatagtgtttttattgttttggttttgttttggttaggatttttgttatttttatttttttttaagtgaggtgggagttggagttatgagatgaaagacgggaaagttatgaaaaatttatgataaagaatgttgtttttttggttaataatagtcgagtatcgggtgtttttttttatttgaaaatatatatagattttttaaagtatgttttttgttattaatttataatttaattatatgataattttttatggtttggagtgtggtgaatttttgtaaatattttatatgggttttaataaatgtgatgtagaattttatatatgtatatgtttattggattaagtatgtggattttgttattttaatttattacggttttttttatttttggattggtttatatataattaagagtggtgtatttatttatttattttttagagatagggttttgttttgttgtttaggttggagggtagtgaagtaattatggttcgttgtagttttaaatagttgggtttaagcgatttttttgttttagttttttagagtagttgggattataggtatgttttataatttttggtttatgaatggtatatttaaatttttaattgtgattgtaggttttttaatttgtttttaatttttaaattaatttttgttttttttgtatttaggttattaaggtgtttatttttgggaattattatagttttggtgaattgagtttttttttaatttgttttgagaatttttttgttttattttgttttgtttgatagtaataagttttatagttgtttttgggtatttgtttattgtatttttttttatttttttgtttttattttttttttgtatttatgttttagatgtagtttttgaaatgttataaatatagatttttgtttttgatttaatttgacgatttttgttttttaatttatgtttaatttatatggtagttaaagtgagtaaatttgtttttgtaagagataaatattgaagttttagtggtttaataaaatataggtttattttttagttacgtgtagtttaaggtaggttgggtattttgtagtttttttttaaaatatgttttaaggtggttaagttttattttgtatttttattattgaaaagtattttatgaatttttagttttgtaggtaggagagagaatttgggaaaggtatattgtttttatggttttggattagaaattatttgttatttttgtttatattttattggtaagaagtaaataatgattttatataggcgtacggggatggaaaaatgtacgttatttatgtgtgtaggaagatataatggtttggtgagtatatggttttgtttttgttgtattttgattgtgtttattgtgaatattgatgtatttgggtttgtttgtaatattttatttattttaatatttttattttttaaagtttttttgtttgtttgtttgtttgtttttgagacggagtttcgttttgttgttaggttggagtgtagtggtatgatttgggttggtttattgtaatttttgtttttcgggtttaagcgattttttttagtttttcgagtggttgggattttaggtgtatgttattatgtttggttatttttttttttttttttttgtattttagtagagacggggttttatcgtgttgtttaggtttatttttttgagtttaggtaatttgtttggttcggttttataaattgttaggattataggcgtgagttattatattcggttaagtttttttttttaatttttattgttttttttttttttaagtgttatcgatattttttttattttttttttgattggataagaattttagtatgtttttaaatttatttatatatttttttttttattaaattatttggttaatattattttttatattttttggtattttttagaatgcgttttttgattagaattttttttttaaaattttttagatgtgggaatttgtatagtaaattttttaaagttttgtatgtttgataattttttaaaattatattagtatttttgaataaagtttagttgtgtattatatattatttgaagtatttttttttttaatattttaaataatattattttaaatttttttttttgtatttaatgttatagttagaaaattttatgttagttttttatgttggaattttttagaatttttttattgtttttgatatttttaaattttgttagtgtgtttagagtgggtttttttttttttttgtaagatattatggattttttttattttttaattttgggaatttatttttttatttttttaattattttttttttttattttttgtttttgtgaaatttatataatttatatttggataattttttttttttttttttttgatttttttattgatgattttttaattttttttttttttgttttgaattagttttttagtgtagttttttatttttttgttttgttttttagttgtattttttttattatttattttattaatgtggtttttattttgattattatatatattttttatatttagaatttttaggtgttttttttatattttttatttttttatattataatagtttttgatttttaaagtgtatttttaatgtttattttaagcggttggtttatattttttattattttttttaaggatatagatggttttgtttgttgttttttttttgaggtgtcggtattttttaaaggtattattttgatttattagtggttatttgtgttggtgttatgtgtgtaaagagaaaggagggttagttggagttttaggttagcgtaaaattatagttattattttttgggtgttattttaggttaggattttagggtgggagtattaggaggcgtagggagtattgatagttggggtggtagaggaggtaatgattagggtagtttttagttttttttattttagtaggattttagtttggatttttttatttattttttaatagttggataggtaattaggattttgttatcgttttttgtagtagggagtaggtagtgattgtttaaggttaatatcggggaggtaagagtagaaggttttaggaatttttttatagttatagttagtaagtaatttagtttagaatattttttagttttattagggtttttttattatttgtttttttggaatgtatatgtatggtttatatttttttttagatggaaagggtttgtaagaagggattatggatgattgaatttttgttatataattttttttttttttttaaacgttagtacgttattaaataaataagttaatgataataaataaaagtgaataaagtggataattttgattttagggagaggtattgttattgggattagagtttaataatgaggtaaatatagattcgataaaaatttattaaagtgttttttaaaaatgatataaatttagttgttttaaattgtttaaaatgttgattttgaggtaaagttgtatttgttatgttttttggagtatgataagtttaggtaggtgttgggggatattttttattaaatatatgtttataggatatttgatgtgatttaggtattgtgtgttgttttgggagtatagaagagtaggatatgatttttttttttaaggattgtgttgttttgtgtagtagttataagttatttgtagttattaagttaaaaaaaattttaagtataaaatgtttt

SEQ ID NO: 25 - DNA, 8093 bp, Artificial Sequence
  chemically treated genomic DNA (Homo sapiens)
ttatggaaggaaatgagattagttagcgagttgatatagaataaggtagtttaaaataaatttttttaaaaatacgaagaatagatattgaagggaagaggtgtttgtaaagattaagaaagtatatttggagatggtatttttttaaagttaaagttattaagtgtttaagtgttttaaggagggtaagattattaataaggatttagtatagtagagtaatttgagtggtaatacgggatattgggaatataaatttgttaagaaaattagtaggaatgagttataggatagtaattggtaaggatttaataattttttttttaatgtacgtattttaattatatttattgttataataggattagtaataattatatttatttaaaaaaaaaaagattgttatgtagttatagaattatttaatatagaaaatagtaaaatatatttttttttttttttttttttttttttttttttataaataagattagtttatagtaaattttttatagttaagggttaatttaaaatttttggtttatattttttttttatttaatgattatatgatgtaaattaattttattaatattttaagtaaaatatattggaattttataaaatgtataagattttaatatttaaggaattggggttagaaagtagaagtggtttttaggttttttagttttttttttaagtaataaagttttgttgtgaatatttaaagttattgggaaattatcggtagatttttttgtttttttttttcggttttttattatgttgtttttttagatatgtaagtttattttattaattaaaattttagtttgattatttttgataagtatttaatcgatatgtaattttttttttgttttaaatatgtataataggatagagtttttaaatttgatttaattattaatttttgatttataagtgttatggtgagttaatagaatttattaatgtttttattgtattttattagttaaatttagaaggttggaattagttttttttatttagtattttgttagtttgtttagtttgtatttttaattttgtttttaatggtaatttgttttattttttgaaataaaataatttatattttgggagggttaattttttattgtgttaggttgttttatgtattgtaggggtgagtgtttttaggtttaaatgttaatagaagtttttagtaaatatgataattaaaaaagtgtttttatatattttttagtattttttggaatgataggttattgtttttagttgaaagttattggtataattttggtttttaagtttttatgttatttattttaattgtttagatattaattttatttaaatttttagttatagtttggttttttgaatttgttggattagtaattatagattaaggtgttttaatagttaagataggattttggaataagagtttttaaattgtataatatttgagaggatttatgaatataaattgggttttgtttataattagttttatataatgaattttaagattgtttttttatggtgaatagaagtttggaaattattgttttggtataaagtagattattttagtagaaatatagaattattgtaatttgtgaataagattgtttttaaatatttttatttgtgtgttattttatatatagaatgtgtacgatagttttaaattttagaataaatttatttttagtatttaataaaatttgatattgtattattttaaaataaagtgtttattttaggtaggattttttaaaataaagtagtaatatttacgtagataagataaaaaagttaaaatattttatattttttaattttggagtgtaattttttttttttatcgtttttgatagggttaaatttgtgtttatagtaaaaaaaaaaaaaaaaagaattattaattggtaattattaagattttatatttattatagttttttaataggtaagttgataaaatagtttttagttattaaaaaaaaaatttaaggaaaatttttaataattagttttatttttaaattgtatgaagttttttatatttgaaatttaaaaatgattttaatgattttttttattagtaatgtgttattattgaggtgggtgatggggagggaagagggaagaaatttgttagtattattttcgaatttagaaatgtttaaaaaaaagttttaaatattttgatggttagataaaatatttttattgttatgtatgggttttttttttggaaatttatgaatttgttatgtgagtttttgtaaattggtttaaaagtatatttaaggagttgataatttaagattatatgaattagaattttaatattttattaaaataagagttgaaatttttggtatttatttttagaatatttaaaaaatagattgtaaatttaatttatattaatattaaatttttttaaaattaattatattataaaagataatgattttgttattaaattaagttttaaaaaaggtggtatttttatgttttagttttatgttgttatttgagatgaaaaaaaaggtaattgttagaattttaattgtgattagtttggacggttggtatttggtatttttttataatttaaattagtaaatttgaaaatttaaattaatttttgtttttagaattaaatttttgttgagttttttaattttgtattataaagttttatggattagatttattttttttttttataaggttattttaatcgggttttattttagttgtggtaattcgaaatagggtttggagatgtttatttgttaatggttgatttaaagtgtgttggtttcgagttaaatatgaaaaagtttttttatagatttggttattattaaataaggatgttattttataggtaatttttttgataattgggtaggatttagtagataatttagtataaaattgttttaagtttttgattttgtatttattttaaagattagtgtttgtttgaagttttgttagttttatttttattgaaataggtgtatatttaggtttaaagttaaatggatttgaaaaaagttttaagttttttttaatgaatttgaggtttttaaaatgttttttaaattttttttggagacgatagattattatttgatatttattaggattaaatatttttttattttttttattttgttgttttagtttattaataatttttttgagggtaggaaagtttgttagatttttttttttaatatgtttttgaaataaatttagtttaatttcgaaagtataaatatggttaaaggtagtagtagtaaagattttattaattcgtaattttttattgagttttcgaaggtgttttataatgtttattaagaagttaaagttataaagttattgtttgtttgagaagtggattgttgttgtttttattgaaattaagaacgtttttatttttttttttagagagaatattagttttaaagtttttttttttttaagttaattgtttagatatcgtttattaatttttttattatgttttgatttagatttcgttagtaaagtttgaaatttaggtcgtttaacgtttttggttttaattaaaattatttattcggatatggtatttatgatttgattaatatttatattataggagtttaatagttttaagtgaagaaattttgaataatgaatgatattttaatagttggggtttacggtttttttttttatgtatgagacgagttttgagtttttattaattatttttaaagtatgggtcgtggttagtttaattattttttgtaagttaagttttgttgtttgtagggattttaggattgtcgatatgagcgtattaatattgaaatgatgagttaggttgattatggttagaagatttttttgtatttttaatttagggtttatatcgcggataaagattaggaggtagtttttataggttataaaagtttggtcgtttaaggtaagagaataggttttaaagtttttggttcggttaaaaagttggttgcgtagatttttgttaatgtttaggattttttgttttgtgatatttggagataagttaacgttttgtaggacgtttatatgttcgggtagtattttttttagtaatatttttatgtattggtatataaagttttttttattttagtcgcgattttttaaggttaagaggcggtagagttcgaggtttgtacgagtagttttttttttaggagtgaaggaggttacgggtaagtcgttttgacgtagacgttttattagggtcgcgcgttcgtcgttcgttatatatcgttcgtagtattcgtgtttagtttcgtagtggcgtttgacgtcgcgttcgcgggtagttacgatgaggcggcgatagattaggtatagggttttatcgtttttcggaggttttattattaaataacgttgggtttattcgggtcggaaaattagagtttcgtcgatttttattttgttttttttgggcgttatttatattttgcgggaggttataagagtagggttaacgttagaaaggtcgtaaggggagaggaggagtttgagaagcgttaagtatttttttcgttttgcgttagattattttagtagaggtatataagttcggtttcggtatttttgtttttattggttggatatttcgtatttttcgagtttttaaaaacgaattaataggaagagcggatagcgatttttaacgcgtaagcgtatatttttttaggtagcgggtagtagtcgttttagggagggacgaagagatttagtaatttatagagttgagaaatttgattggtatttaagttgtttaattaatagttgtcgttgaagggtggggttggatggcgtaagttatagttgaaggaagaacgtgagtacgaggtattgaggtgattggttgaaggtattttcgttgagtatttagacgtttttttggtttttttggcgttaaaatgtcgttcgtggtaggggttattcggcggttggacgagatagtggtgaatcgtatcgcggcgggggaagttatttagcggttagttaatgttattaaagagatgattgagaattggtacggagggagtcgagtcgggtttatttaagggttacgatttaacgggtcgcgttatttaatggcgcggatacgtttttttgttcgggtagaggtatgtatagcgtatgtttataacggcggaggtcgtcgggttttttgacgtgttagttaggtttttttttttttcgtagatcgtgtgtttttttatcgttttttttcgagattttttaagggttgtttggagtgtaagtggaggaatatacgtagtgttgttttaatggtatcgttaattaagtaaggaagttatttaatttaaaattatgtatgtagaatatgcgaagttaaaagatgtataaaagtttaagatggggagaaaaatttttttttagagggtattgtgttattgtttttttgttttttatttattttagaaattatttgtttatatttaaaggtataatttattttgagttttttttaaaataaatcgtttgtagttttaggataggttgatgtattttgggtttgatttttgattattttattgttaaattagtgattttttttagtgtttttttgttttttatttcggaggacgtatttcgaagatattagattttatgggttatttttggattttgaagtttataattgtgataaaaaatgtgaagggaagagatttgaaatatgtggaaggaaaagtgagtgtagattataaatttttaaaaagataagtttaaaatatatttaaacgttatgttagattattttgttaaaattagttgttagtgacgttcgtacgttaatagaaaaaagaatgttttagtttggagtggtaggtttttagagggatttattgtgaaagtataaattatttagggtaatgggattgagagaatagtgggtagaaaggattattgaaggaaaggaagagaattggaaggtagatgaaagaaggagtaagaatttggggatgtttttttttttttatttgtaatagtagtaatagaagtaatggtagattggtttttgtttttattgtgttagaatgaattgataggataattgggtttattattgtattgtgttagaatattgtaaaataaaattaaatatattagtttggtggtttgtaattaattatttaagtggagatttttattttttttttattttttttttagacggagttttattttgttatttaggttggagtgtagtggcgcgattttagttgattgtaattttttttttataggtttaagggagatttttttgttttagtttttcgagtagttaggattataggtatgtgttattatatttggttaattttgtatttttagtagagatgggatttttttatgttggttaggttggtgttaaaattttcgattttaggtgaatcgtttgttttagttttttaaagtgttgggattataggcgtgagttatcgcgttttgtagttttttgtatttttaatagagatagggttttattatgttagttaggatggtttcgattttttgattttaggtgatttgttcgttttggttttttaaagtgttgggattataagtatgagttatcgcgttcggtttaagtggagatttttatatggagtttagttatattttttttaatatataagttgagatgattaatataattttaatataggggtttatgagaaatgtttgtaatatttaagtaatttattgtttttttttttttttttttaagatgaagttttattttgttgtttaggcggaagtgtagtggcgtgattttggtttagggtaatttttgttttttggttttaagcgatttttttgttttagtttttcgagtagttgggagtataggcgtgtatgattatattcggttaatttttttatttttagtagagacggggtttttttatgttggtcgggttggttttgaatttttgattttaggtgattcgtttattttagtttttttaagtgttgggattataggtgtgagttttcgtgtttagtttattattttatttttgaataaagaattgtttgtgtggggaatagataatttttttttatgtagtttttgttagaaaatttgttttttttagtagttggtttgtgtttataggttattttttgaaagtataaaaaatttattgattttttttttttgggtttttttttttttttgagatagagttttgtttttgttgtttaggttggagtgtaatggcgcgattttagtttatcgtaatttttattttttgggtttaagtgatttttttgttttagttttttgagtagttgggattataggtatgcgttattatgtttggttaattttgtatttttagtataaatggggtttttttatgttggttaggttggttttaaatttttgattttaggtgatttattcgttttggttttttaaagtgttgggattatgggtgtgagttattgcgtttggttagaaaatttattgattttttaaagatttattaattttttgtattattttttttttttttttttatcgtaaatataaaagggaatagtagagaaaattatttagaattttattttttagtgatattatttagtgatattttattagagttatttaggaatttgaggttgaataaagtttaggtaaaagtaaaattagttgagaagagatatttgttaaaagaaatttatttttaattttatttgttgttttttttagaggaatagaaatagtgttgaatgttttattagaaatgatggttgttttgttcgtttttttttttttttttatataatatgtaaatttatatagtgtatgagtttgtaagataaaggaaaaatacgttaatgaggtattattgtttgtatttggagtttgttattattgtttggtttatattaaaatatgtatattagagtagttgtagattgataaattattttttgtttgatttgttagt

SEQ ID NO: 26 - DNA, 8093 bp, Artificial Sequence
  chemically treated genomic DNA (Homo sapiens)
attggtaaattaaatagaaaataatttattagtttgtaattattttaatgtatatattttaatatgagttaagtaatgataataaattttaaatataaataatagtgttttattaacgtgttttttttttgttttataggtttatatattgtatgagtttatatattgtgtgagagagagggaagagacgggtagagtaattattatttttaataggatatttagtattatttttgtttttttaggaaagatagtaagtgaagttaaaaatagattttttttggtagatgtttttttttaattaattttatttttatttgaattttatttagttttaggtttttaagtgattttaataaaatgttattaaataatgttattaaaaaataaaattttgaatgattttttttattatttttttttatatttacgatggaggggaaaaaaaaaagtaatgtagaaagttaataaatttttaggaagttaatgaattttttggttaggcgtaatggtttatatttataattttagtattttgggaggttaaggcgggtggattatttgaggttaggagtttgagattagtttgattaatatggagaaattttatttgtattaaaaatataaaattagttaggtatggtgacgtatgtttgtaattttagttatttaggaggttaaggtaggagaattatttgaatttaggaggtggaggttgcggtgagttgagatcgcgttattgtattttaatttgggtaataagggtaaaattttgttttaaaaaaaaaaaaaaatttaaaaaaaagaagttaataaattttttgtgtttttaaagagtagtttataagtatagattaattgttagagaaaataaattttttagtaggggttgtatgagaaagagttatttattttttatatagataattttttatttagaaataagataataggttgggtacgggggtttatatttgtaattttaatatttggggaggttgaggtgggcggattatttgaggttaggagtttaagattagttcggttaatatggagaaatttcgtttttattaaaaataaaaaaattagtcgggtgtggttatgtacgtttgtatttttagttattcgggaggttgaggtaggaagatcgtttgaaattaggaggtagaggttgttttgagttaagattacgttattgtattttcgtttgggtaatagagtaagattttattttaaaaaaaaaagaaagaagataataagttatttaaatattatagatattttttatgagtttttgtattgaagttgtattagttattttaatttatatattaaaaagagtataattggattttatataaaaatttttatttgagtcgggcgcggtggtttatgtttgtaattttagtattttgggaggttaaagcgggtagattatttgaggttaggaaatcgagattattttggttaatatggtgaaattttgtttttattaaaaatataaaaaattgtagggcgcggtggtttacgtttgtaattttagtattttggaaggttgaggtaggcggtttatttgagatcgagagttttgatattagtttgattaatatggagaaattttatttttattaaaaatataaaattagttaggtgtggtggtatatgtttatagttttagttattcgggaggttgaggtaggagaattttttttgaatttgtgaggaggaggttgtagttagttgagatcgcgttattgtattttagtttgggtgataaagtgagatttcgtttaaaaaaaaaataaaaaaaaaataaaaatttttatttaagtaattaattataagttattaagttagtatgtttagttttgttttatagtattttggtatagtataataataggtttagttgttttgttaatttattttaatatagtagaaataaaagttagtttgttattgtttttgttattattattataagtgaaaaggaaaaaatatttttaggtttttgtttttttttttatttattttttaatttttttttttttttttagtggttttttttatttattgtttttttagttttattgttttgaatagtttatatttttataataaatttttttagaaatttattattttaaattgaagtatttttttttttattaacgtacggacgttattaataattgattttaataaaataatttgatataacgtttaggtgtattttgggtttgtttttttggaagtttatagtttgtatttatttttttttttatatgttttaaattttttttttttatattttttgttatagttataagttttaaaatttaaggatgatttataaaatttggtattttcgaagtgcgtttttcgaaataaaggataggaaaatattaagaggggttattaatttaataatagggtaattagaagttaagtttaaagtgtattagtttgttttaaaattataaacgatttgttttgaaagaaatttaaaatgaattgtgtttttggatgtgaatagatgatttttggaatgaatgaaaagtaagaaaatagtaatatagtattttttgaaaaaaggtttttttttttattttaagtttttatatattttttaatttcgtatgttttgtatatataattttaaattaagtggtttttttatttagttaacggtattattaagataatattacgtatatttttttatttatattttaaataatttttaaaaggtttcgggggagagcggtaaagaaatatacggtttgcggaaaaggagaaggtttgattggtacgttagggaattcggcggttttcgtcgttgtgggtatgcgttgtatatgtttttgttcgggtaaagaggcgtgttcgcgttattgagtgacgcggttcgttaagtcgtagtttttaagtgagttcggttcgatttttttcgtattagtttttaattatttttttgatagtattagttggtcgttggataatttttttcgtcgcgatgcggtttattattgtttcgtttagtcgtcgaataatttttgttacgaacgatattttggcgttagaagagttaaggaaacgtttagatgtttaacggaagtgtttttagttaattattttagtgtttcgtgtttacgttttttttttagttgtagtttacgttatttagttttattttttagcggtagttattgattggatagtttgaatgttagttaaattttttaattttgtgggttgttgggttttttcgtttttttttgaagcggttattgttcgttatttagaaggatatgcgtttgcgcgttagagatcgttgttcgttttttttattggttcgtttttaggagttcggggaatacgaaatatttagttaataggagtagagatgtcggaatcgggtttgtgtgtttttgttgaggtgatttggcgtagagcggaggaggtgtttggcgttttttaggttttttttttttttttgcggtttttttaacgttggttttgtttttgtggtttttcgtagaatgtggatgacgtttaaaagaagtaagatggaagtcgacgaggttttagtttttcggttcgagtggatttagcgttatttggtggtggagttttcggagggcgatggggttttgtgtttggtttgtcgtcgttttatcgtagttattcgcgaacgcgacgttaggcgttattacgaggttgagtacgaatattacgagcggtatgtggcggacggcgagcgcgcggttttggtggagcgtttgcgttagggcgatttgttcgtggttttttttatttttgaagagagagttgttcgtgtaggtttcgggttttgtcgttttttggttttgaagggtcgcggttggggtgagggggattttgtatattagtgtatggaggtgttgttgagagaggtattgttcgagtatgtaagcgttttgtaaggcgttgatttatttttagatattataaggtagaggattttgagtattgataggaatttacgtaattagttttttaatcgagttagggattttaaagtttatttttttgttttggacgattaggtttttgtggtttatgagaattattttttggtttttattcgcggtgtaggttttgagttggaggtgtaagaagattttttgattataattaatttgatttattattttagtgttggtgcgtttatgtcggtaattttagagtttttgtagatagtagggtttagtttgtagagaatggttggattgattacgatttatattttgaggatgattggtgagaatttaggattcgttttatatatgagagaaaaggtcgtaagttttaattgttggaatgttatttattatttaggatttttttatttggaattgttgagtttttatgatgtagatgttaattagattataaatattatattcgaatggatagttttgattaagattagaggcgttaggcgatttgaattttagattttattaacggaatttgaattagagtatggtgaaagggttaatggacgatgtttgaataattggtttaggagagggaaaattttaaaattaatattttttttaagaaaagaaatggaagcgtttttggttttagtaggggtaataatagtttattttttagataaataatggttttgtgattttggttttttggtggatattatggaatattttcgagaatttagtgaagaattacgagttagtaaagtttttgttgttgttgtttttgattatatttgtattttcgaagttaagttgaatttattttaaagatatattgaggaaaaaaatttaatagatttttttgtttttagagaagttgttgatgagttaaaatagtaaaataaggaagatgaaaaaatatttgattttgataggtattaaatggtgatttgtcgtttttaaaaagaatttgagagatattttaaggattttaggtttattaaaaaggatttagaattttttttaaatttatttaattttaaatttgaatatgtatttattttagtgagggtggagttaataaaattttaggtaaatattaatttttggaatgaatatagaattaaagatttggggtagttttatgttggattgtttgttgaattttatttaattattaaaggggttgtttgtaaggtggtatttttgtttgatagtaattaaatttgtgaaaaggtttttttatatttgattcgaaattaatatattttgagttagttattaatagatgagtatttttaagttttgtttcgggttgttataattgaaatggagttcggttgggatgattttgtgagagaaagaaatgaatttaatttataaggttttgtagtataagattgaaaaatttaataagaatttaattttaaaagtaaaaattggtttgagtttttaagtttattaatttggattgtgagaaagtattaagtattagtcgtttaaattgattataattaaaattttgatagttgtttttttttttattttaaatggtagtatgggattgaaatatgagaatgttattttttttaaaatttagtttagtgataaagttattgttttttatgatatagttaattttaaagagatttagtattaatgtgagttgaatttgtagtttgttttttaggtgttttgaagataaatgttaaaaattttagtttttattttaatggagtgttaaaattttgatttatatagttttaaattattaattttttaaatgtgtttttgaattaatttgtagaagtttatatagtaagtttataagtttttaaaaaggaagtttatatataatagtggaggtgttttgtttaattattaaaatgtttgagatttttttttaaatatttttgagttcgaaggtaatattgatagatttttttttttttttttttttattatttattttagtgataatatattattgatagaggaagttattagaattatttttaagttttagatataggagattttatgtaatttggagataagattaattattgggggttttttttggattttttttttaataattgggggttattttattagtttgtttattaaaggattatggtaagtatagaattttaatggttgttagttagtaattttttttttttttttttttattgtagatataagtttggttttattaaaaacgatgaggaaaaaagattgtattttaggattaggaggtgtgagatattttagtttttttgttttatttgcgtgggtattgttgttttattttaaaaaattttgtttaaagtaaatattttgttttaaaatgatatagtattagattttgttagatgttagaaatggatttattttaaaatttggaattgtcgtatatattttatatgtaagatagtatataagtagaaatatttaaaagtagttttatttatagattgtagtaattttgtatttttattaagataatttgttttgtgttaaaatagtaatttttaaatttttgtttattatgaaaaggtaattttaaagtttattatgtaaaattaattataaataggatttaatttatatttatagatttttttaagtattatataatttaaaaatttttgttttaaagttttgttttaattattgaaatattttaatttgtggttattaatttagtaaatttaaggaattaggttatgattaagaatttaggtggaattgatgtttgggtaattaaaataaatggtataagagtttaaaaattaaagttgtgttagtggtttttaattagaggtagtaatttgttattttagaggatgttgagaaatgtgtaggggtatttttttggttgttatatttattaggggtttttgttggtatttaagtttaaagatatttatttttgtagtgtatgggatagtttggtataatgaagaattagtttttttaaaatgtagattattttattttaagggatagggtagattattattagaagtaaaattaaaagtataagttgggtaaattgatagaatattagataggagagattaattttaattttttaaatttggttagtaaagtgtaataaaggtattgataagttttgttagtttattatagtatttgtaaattaggaattaataattgaattagatttaagggttttgttttgttatatatatttaaggtagaaaaaaagttatatgtcgattaggtatttattaagaatggttaagttgagattttggttaatagagtaagtttatatatttagagaaataatatagtggaaaatcgaaaaaaaaaaatagaaaaatttatcggtaattttttaatagttttgaatatttatagtagagttttattatttgagagaaagattggaagatttgaaagttatttttgttttttaattttagttttttaaatattgaaattttgtatattttgtgaaattttagtatgttttgtttaaggtgttaataaaattagtttgtattatgtagttattgagtgagggggagatataagttaaggattttaaattgatttttagttatagagaatttgttataagttagttttgtttgtaaaaaaaaaaaaaaaaaaagaaaaagaaaaaagtgtattttattgttttttgtattaagtaattttgtaattgtatggtagtttttttttttttaaataaatatagttgttattggttttgttgtagtagtgaatatagttaaaatacgtatattaaaaaaaaaattattaggtttttattagttattgttttatagtttatttttattagtttttttgatagatttgtatttttagtgtttcgtattgttatttaaattgttttattatgttaagtttttgttaatagttttattttttttgaaatatttgaatatttgatgattttagttttgaggagatattatttttaggtgtgtttttttagtttttgtaggtattttttttttttaatatttgtttttcgtatttttaaaaaaatttgttttagattgttttgttttgtgttagttcgttagttgattttatttttttttatgg

SEQ ID NO: 27 - DNA, 6246 bp, Artificial Sequence
  chemically treated genomic DNA (Homo sapiens)
ttttgtatatttgtattttatataataatattttgtgtaatttttttttaaatgtagaatattgatattggagaatgttttttatatattttaagtgaaaaaggagtaaaaattatataatgtattattttatttttttaataaaatgtaaatgtgtatagtaaagatatagaggtgttatagtgttagggaaaaggggtgtaagattagtgtttgttttttattttttgttttgtttataaattttttatattaaaaatataaattttaaatgaaaataatggaataaatataaatttttattttataattaattaaaatgatagtaattgaattttttaaagttttaaatttattaaaatgggagaaatggatgatagtattagcgtttgaaaggtggaaagtggagggacggtgggtagattatttggttgatttaagaaaattgaattttaggttagttgagatttatgttgatttatagaattttaagaatgtttaggaattgggagaagattaaggatattagaagagaagggggtgaaaataaggaaagttgttgaaatttagtttaagaaatagttagatatttatttttgtttattaaagtcgagtgatttttttgtagtagggtttttttcggataggatatttggattaagaaatattagatatagtagagggcggtcgaaatatgttgaaattaggaatagttaatagatgttgaggtttttattttagttttttttttatttttgttgttggaatgttggagatagggagaattttttttgcgcgagttgatttgtttgttaaaaaaacgataaagaaattgttataggaggttttttaagtgaaaatagttagttatttgttttataggaaatagtttttttttatataattatttttagagatttttgttttaatatgtgtaggtaatttaggattatttaacgtgtaaggaaagtttataagatggaaaaaaaattttttttgaggtagggtttggttttgttatttaggttggagtgaagtggtgtgattataatttattgtagtttcgatttttgagtttaagtgatgtttttatatagttttttaagtagttgggattataggtatgtataattatgtttggttaagttttttttatgttttgtagaagtaaagtttttttatgttttttaggttggtgttaaatttttgggtttaagcgatcggttttttaaagtgttggaattataggggtgagttatcgcgtttagtttaaaataattttttaaagaaaatttgtagaaaataaagattatgtatgaaaaaggaaatttagaagatattaatgaaataagaatatagtgttgttagcgtgtatgtgtatatgcgtatatatatataaagaattaaatatttttaggaagataaagttatgagaatattttagagaagagaaattttttaaatggaaaatagaataaaaagaaaattaaaggataagtttaagaggtatatagttaaaaaaaatggtagttttaataagagagaataaagaagaaaagttataaaatgttttaatttaagtgtgaatataaaaatatattatttttatagtaagtgagaaaaatagggtgtaaaaggtgtatatgatgttattttatatgtagggataagggaaaataagattatatatttatagttgtttgtatttatataaattaataggatattaaaaaaaaaaaaaaataatatttaagaaaaatagttatttgtgagggaaggtggagattttattgaattttttatatatatagttgatttttgaatagtaggttttgaattgtatagatttatttatttacggatttttttttgtttttgttatttttgagatgataagatcgattttttttttttttttttttcggtttgtttaacgtgaagatagtgacgttgaagatttttgtgatgttttatttttatttaatgaataggaaatatatttttttttttttttttgtgatttttttaataatttttttttttttttttttttttttttaagacggagttttatattgtcgtttaggtttaagtgtagtggcgcgatttcggtttattgtaagtttcgtttttcgggtttacgttatttttttgttttagttttttgggtagttgggattataggcgtttattattacgttcggttaatttttttgtatttttagtagagacggggttttatcgtgttagttaggatggttttaattttttgatttcgtgattcgtttatttcggttttttaaagtgttgggattataggcgtgagttatcgcgttcggtttataaataatttttaaaagatagtaagggatatagtagggtagtaagtgttttatttataagaggagtagtaatgttagaggtttatagagtacggatttttagcgttgtcgttttatataattagtttttttgatttttaaaattatttgtattcgtaatttttttaaaaataaaaatttaaaaaattaaatttttttatttataaaaataatttttttaggttttattttttttgattgggtattatgtttttgttaacggagatttagagtttagagaaattcgaaaaagtaattttagtttttttaggatgagttggtcgggaggaagggaggttttaattttagcgtttcggggttagagtaaagcgaagaggttttttatggttataagcgggcggtttacgtagcgtattgtaggtaggtgcgagttatatgcgttaagtgttcggagcggttttttggtagttagtgttaattaaaattattcgtacgggagtggattttcgttgataatttagaaataagtaatagattttttgatgtagttatttgtgtcgcgttttttcgtatcgttcgttacgttttggtttttggagattattttttagggtaggggttgtcgttcggtcgggttcgcggggtttttcggtttgatatggtcggtgttggagcggtacgtgcgcgtttcggtttttcggtcgttttcgtttttcgtcggtgcgtatcggcgttcggggagtcgttggttcgggtgtttagtcggtttttgttttgtttggcgttcggatcgttatttttgtcgttttttcgttagttttcgtagtttttagattggtcggtttgcgcgtttatttttgtttttcggatcggttatcgtcggaggtcgcggaggagggttcggtcgcgtagatttcgtttatcgggtttatttttcgttatataaggttatttttttattttcgcgggttatcgtcgtcgtaatcgtcgcgttagcgtttttttttacgcgcgggggcgtttttgtttatcgttttcggtagggtttttggtggttatgggggataaggggcgttgatttattcgggcggggtttcgggagttgtatagattaaggtagtttttcgtttttttttttattacggagattttgtgggagatgtcgtgggttttttattatagattaggaaataggttcgtagaggggttatacggttaagtagcggtattttaggtattgggggttttcgaggggaaggggtagatttttgggagttagagttagtagttgggttgggaagtttcgagtgtggatagagagggtgggaatgacgttttttgtgggaagagagggtgggtaagtttgggatgtttttgagcgggaatttagtatgttttgtgaggagggttataagtatatttttgtgaggaggttgagttttatcgaggataggacggagggagtttgagtaggtagagagggggtttggggaggcgttggttcggggaggaagtgggtaggggagaaattttgatattaatatttaataggtaaatgtcgtggtttttgttgtgggggtttttggaggatttttaggaaaacgagggaagagtaggaaaaggcgatatggttgtaggggttaagtttaggagtcgttttttatagtatttattttgtagaagggaaatttgaggtttttagacggtaggggttgattttgtagagattggtgagtaaaggggattattttaagttttagtggtattaggaatatttataatttttgatttggattaaggttgttagtttggtttagttaagagttttttagaaggatggtttatatattttaaattaaaggggttagatacgtgtatattatttttagttattttggaagttgaggtggggggatcgtttgagtttgggagttggaggttagtttaggtaggtaatatagtgagattttatttttaaaaaaataaaataaaataaaataaaaaaatattaaaaaagtttttagaaagatttttgaatttttttggattttttagtggagatttggaaatttgaattttgataattttttttatagtggggttaaggaggaattaggtaagttaaaagaagtgaattttatttttttattgtttgtttgaattttgtatttaagtaagtgttatttaagtaatttaagagattggtttatcgaaaaaataaaattttttaaatttttatagttggtagattgtggttatagttatagtgtattaagattatttgtttagtatttttggtgatttaaaagggtttgaggataggagtttagagttgggttagttgtttaggtatttagggttgttataggtaaaattgttggaatttagggtagtattgtaaatgttacgtcgtttttagggttttttgtttgtcgttggaattaaatttatttagattttggaaattttgttttggattttttttaataagtttatgagaaattaaatttttttttttatgcgatattggattttttataaagtaaaattaagatgagtaaagatgtggtttttagatagtgtttgaaaaagtagagattatggtgttaggcgttattatttgggtttataaaagttgttataagacgttaaggttataagttatttagtttatgtattcgttttttaatttttttttgttggtattgggttttatggcgtttttgttgattacggttattgtttttatttgttttggcggttttgtttttttaggttttgtgtttttttttatagtttttagggagtttattgaggagttggttaatattatttagaattagaaggtgagtgtcggttagttagggttttagttatgagggttttagggtgggtgatttttaagatgaggttatgagtaggttgggtttggttttaagatgtttgtaggttaggaaaaatttttatggattaaggttcggtttagttatgagggagagaggagttgggttggggggtttagtattgtggatggatttatggaggtgtttggtagattttttagggattatttgtttttttggtttggttttgtttgttattgttagtttttatttagttatttttgaatagaggatagtagagaagggttagtatttttttagaattatgtggtatttgttaattggattttgattataataatgtagttattttttttagtattattataggttcgtttttataggaggattttttagtagagttcgttttttgttttattagtaatagtttatatgtttgagtattgtttatattaggtttggtgtacgtgttttatgtgttattttattattgttagttattttaagaggtaggtacgatgaatttattttgttaaggtttagtgaggttaagtgatagaggttggatttaagttaggtttggttaatattagagtgtttatgtttttaattgtagtgtttttttattattagaaggtagggtatttaatatattagatttttatcgttttttatttgatttgttttggttaatagtggtttaggttatttttattttattcgtttttattttggtttttttcgtaggtttttgtttttttgttttgattatggtaagttttgtatgtagtttgttttttattagtggtgttaattttttttttttagttttaagattttaaatagtgggattttatttttatgtttgttgtttaaagtagaaaacgaagtttaggaatgttgaggggttgttaggtttgtttttgtgttatattagggatgtttgtggggtttgtgttggggtagatttggtttgggttgttagggtaggtttataatttttgttagtattttgtttattgttattttgtttttatagg

SEQ ID NO: 28 - DNA, 6246 bp, Artificial Sequence
  chemically treated genomic DNA (Homo sapiens)
tttgtgggagtaaagtgatagtgagtagagtgttggtaggggttgtgggtttgttttggtagtttaggttaggtttgttttagtataggttttataagtatttttggtgtggtatagaggtaggtttggtagttttttagtatttttgagtttcgttttttgttttgaatagtaggtataggggtgaggttttattgtttagggttttggagttgagagaaaaaaattgatattattagtaagggataagttgtatgtaaggtttgttatagttagggtaggaggataggggtttgcgggaagggttagggtggggacgagtgaagtaggagtggtttgggttattgttgattaagataaattagatgggaggcggtggggatttggtgtattaaatgttttgttttttgatggtgagggaatattgtagttaggagtatggatattttggtgttggttaggtttggtttgaatttagtttttgttatttaattttattgaattttagtagaatgggtttatcgtatttgttttttgaggtggttggtagtgatgaaatgatatataaagtacgtgtattaggtttggtgtaagtagtgtttagatatgtgagttgttattagtggggtaaggagcggattttattaaggaatttttttgtaagggcgggtttatgatggtgttggggagaatggttgtattgttatggttaaaatttagttggtaaatgttatatggttttgggagggtgttggtttttttttgttgttttttgtttaggaatggttgagtaggagttggtagtggtagataaggttaggttaggagagtaggtagtttttggggagtttgttagatatttttataggtttatttatagtgttgagttttttagtttagttttttttttttttatggttgggtcgggttttggtttatggagattttttttgatttataggtattttaggattaggtttagtttgtttatgattttattttgggaattatttattttggagtttttatagttaggattttggttagtcgatatttattttttggttttgggtgatgttgattagttttttaatgagttttttgagggttgtagagggaggtatagggtttggggaggtaaagtcgttaaggtaagtgagagtaatgatcgtggttaataaaagcgttatgaggtttagtgttaataggagaggattgaggagcggatgtataggttgggtggtttgtggttttggcgttttgtggtagtttttataggtttaagtggtgacgtttgatattatggtttttgtttttttaggtattatttagaaattatatttttatttattttgattttattttgtggaaaatttagtgtcgtataaaggaaagagtttgattttttatggatttattgagaagggtttagggtagagtttttaagatttgggtgggtttaattttagcggtaggtaaggggttttgagagcggcgtggtatttgtaatgttgttttgagttttagtagttttgtttgtgataattttgagtatttggatagttgatttaattttgagtttttgtttttagatttttttgggttattagaagtgttgagtagatagttttagtgtattgtggttgtgattatagtttattagttatgggaatttggggagttttattttttcgatgaattagttttttaaattatttaagtaatatttgtttggatataaaatttaaataggtaatagaagagtaaagtttattttttttggtttgtttaatttttttttggttttattgtgagagggattgttaaagtttagatttttaggtttttattgagagatttagaaagatttagaggtttttttgggagtttttttggtgtttttttgttttgttttgttttgtttttttggagatggggttttattatgttgtttgtttaggttggtttttaatttttagatttaagcgatttttttattttagtttttagagtggttggaagtagtgtgtacgtgtttggtttttttaatttaaagtgtatgggttatttttttgggaaatttttaattgggttaggttggtagttttagtttaggttagagattgtaagtgtttttagtgttattggggtttggggtgattttttttgtttattagtttttgtaggattaatttttgtcgtttgggggttttaaattttttttttgtagaatgagtgttgtggagggcggtttttgggtttggtttttgtagttatgtcgtttttttttgtttttttttcgtttttttagaagttttttagaaatttttatagtagaggttacggtatttgtttgttgggtgttgatgttaagattttttttttatttatttttttttcgaattagcgtttttttaggttttttttttgtttgtttaggtttttttcgttttgttttcgatggggtttaatttttttataagggtgtgtttgtgattttttttataaggtatgttggattttcgtttagaggtattttaggtttgtttattttttttttttatagggaacgttatttttattttttttgtttatattcgaagttttttagtttagttgttggttttgatttttagaagtttgtttttttttttcgagggtttttagtgtttggagtgtcgttatttggtcgtgtgatttttttacgggtttgttttttaatttgtagtagagggtttacggtattttttatagggttttcgtgatgggggaaggagcggggaattattttggtttgtgtaattttcggagtttcgttcgggtgagttaacgttttttattttttatggttattaaaagttttgtcgggagcggtgggtaggggcgttttcgcgcgtgggagaaggcgttggcgcggcggttgcggcggcgatggttcgcggagataggggggtggttttatgtaacgggagatgggttcgataagcgggatttgcgcggtcgggttttttttcgcggttttcggcggtggtcggttcgggaggtaggggtgggcgcgtagatcggttagtttggaagttgcggaggttggcgagggggcggtaaaggtggcggttcgagcgttaggtagggtaagggtcggttggatattcgggttagcggtttttcgagcgtcggtgcgtatcggcgaggggcgggagcggtcgaggggtcgaggcgcgtacgtgtcgttttagtatcggttatgttaggtcgagggatttcgcgggttcggtcgagcggtagtttttgttttggagggtggtttttagggattaaggcgtggcgggcggtgcggagaggcgcggtatagatggttatattagagggtttgttgtttgtttttagattgttagcggggatttattttcgtgcgggtaattttaattaatattaattattaaagggtcgtttcgggtatttggcgtatgtggttcgtatttgtttgtaatgcgttgcgtgggtcgttcgtttatggttatggggagttttttcgttttgttttggtttcgaagcgttgggattgggatttttttttttttcgattagtttattttgggaaagttggggttgttttttcgggtttttttggattttgggttttcgttggtaaagatatgatgtttagttaggaggagtaaggtttgagagagttgtttttgtaagtgaaaggatttaattttttagatttttatttttaggaaagttacgaatgtagataattttaaaaattaagaaggttgattatgtaaaacggtagcgttgggaattcgtgttttatgggtttttggtattgttgttttttttgtgagtgaggtatttattgttttgttgtgttttttattgttttttaaaggttgtttataggtcgggcgcggtggtttacgtttgtaattttagtattttgggaggtcgagatgggcggattacgaggttaggagattgagattattttggttaatacggtgaaatttcgtttttattaaaaatataaaaaaattagtcgggcgtggtggtgggcgtttgtagttttagttatttaggaggttgaggtaggagaatggcgtgaattcgggaggcggagtttgtagtgagtcgaaatcgcgttattgtatttaagtttgggcgatagtgtgagatttcgttttaaaaaaaaaaaaaaaaaaaaaaaaaggttgttaagaaaattataaggaaggaggaaaaaatatattttttatttattaagtggaggtggaatattataaaggtttttagcgttattgtttttacgttgagtaggtcgaggaggaagaagaggaggggtcggttttgttattttaggggtggtagaggtaggagagaattcgtggataagtggatttgtgtagtttagaatttgttgtttaagggttaattgtgtatgtaaaaaatttagtggaatttttatttttttttataagtaattattttttttaggtgttgtttttttttttttttggtattttattagtttatgtaaatataagtaattgtgaatatatggttttatttttttttgtttttatatgtgaagtggtattatatatattttttgtattttgttttttttatttattataaaaataatatatttttgtatttatatttagattgggatattttatgattttttttttttgtttttttttattggaattgttattttttttgattatatattttttggatttgttttttaattttttttttattttattttttatttaaaaaattttttttttttgggatatttttatagttttatttttttgagggtatttgattttttgtgtgtgtgtgcgtatgtgtatatgtacgttaatagtattatgtttttgttttattgatattttttaagtttttttttttatatataatttttattttttgtaagttttttttaaaaaattgttttgaattgggcgcggtggtttatttttgtaattttagtattttggggggtcgatcgtttgagtttaggagtttgatattagtttgggaaatatagggagattttatttttataaaatataaaaaaaatttagttaggtatggttgtgtatatttgtgattttagttatttgggaggttgtgtgggagtattatttgagtttaggagtcgaagttgtagtgagttgtgattatattattttattttagtttgggtgatagagttagattttgttttaaaaaaaattttttttttattttataggttttttttgtacgttaggtaattttggattgtttgtatatgttaaaatagggatttttgagggtaattgtgtgggagggggttgttttttatagggtaggtggttgattgtttttatttggggaattttttgtggtagtttttttgtcgtttttttggtaggtaggttagttcgcgtagaaaagattttttttgtttttagtattttagtagtaagggtggagagagggttggggtgggggttttagtatttgttgattgtttttgattttagtatatttcgatcgttttttattgtgtttagtgttttttggtttagatattttattcggagaaaattttgttgtaggagagttattcgattttgatgaataaaaatggatatttaattgttttttaaattgagttttaataattttttttatttttattttttttttttttgatgtttttggtttttttttagtttttgagtatttttgggattttgtaaattaatataggttttagttggtttaggatttagtttttttgggttagttaagtagtttgtttatcgtttttttattttttattttttaaacgttggtgttgttatttattttttttattttggtgggtttaaaattttagaaaatttagttattgttattttagttggttataaagtgggagtttgtgtttattttattgtttttatttggaatttatatttttaatgtagagaatttataaataagataagaaataagaggtaaatattagttttgtattttttttttttggtattataatatttttgtatttttgttatgtatatttatattttgttagaaaaatgagataatatattatatagtttttattttttttttatttaaaatatatgaagagtattttttaatgttagtattttgtatttaaaaaaagattatataaaatgttattgtgtaaagtatagatatgtaaaa

SEQ ID NO: 29 - DNA, 6894 bp, Artificial Sequence
  chemically treated genomic DNA (Homo sapiens)
gatagtttttattattagaatttagagtttaggagtatagttttatattggttttttttaaagtttggattataggattgttttttagaaaagtttgaaagtttttggtaaatagtatttagttatttagttttttttttttagtttttttttagaagagtaattcgagaaaatatttagtagcgtagaggaaagcggtatagtgttgttaatttatttttagtaagatttacggaattttaaaaatatagtttatgggttttaggacgtttgtagttttgttgtttaaaggttttttgtagtattaattttttttttaaattataagtggtgtttataggttttgttgttttttaaattttagagagatttttttttaaatgaaatttagagaatagaaagatttaaaattattttgatttggttagatatagaggtttaagattgttaagttattttgtgtttatttttttattaaagttattaaaatttttttattaaatgaatatttatggaagcgttaagattaattatttttggagttaaatagattttgatttaaattttagttgtgtaatataaagtttgtgggattttagatcggttttttggtttttgggttttaattttttaggggtgagttagattaggggtgagttagagagaataggatttttttgtattgttaataagaggattaaaatgagatttattatgtatagtataggatataagattagttggtatataataagaatttaatatataatagagttttttttttatttttggagtttttaaaaaatataaaaattatatatattttttttggttaaagatgatgattaatataaaaattttattttaggtttatgttttttggattttttaaagagtatttaatagagtgagttatatttggggttatatttgagttattcggggttatgtttttgtgttttgtgatgttgttaattcgatgatttgtgcgttttttttagttaaaaaataaaagtcggttttgtttttttttgtagttttttgaatagttataattattttaattgtttgttttgtttgttaagatttacgtttttaggtaaacgaattaattaagtttttttttgggtatagattataaagttatgaaaaatttgttttttttttttttttttatttattattttatttttgttttttggggagtattgtagagttagagttttttaagattttgtttattgtaagtttaaggtgatggagtttggttttcgggttaggagttaattttagaggttttaataatataagaaagaatgagatttaaagattattttgttaggtgggatggtttatatttgtaatttttagtgttttgggaagttaaagtgggaggatgttttgagtttaggagtttgagataggttttaatagggtatggatagaggaaagtagtatggaattgaagggtggatatttattgtttagtaaattataaattttggaaggaggtggaagggttttagatttgtgttgtttgtagtgaagaaattaagatataaaaaagtaaatgggagaggatagtagacggttttgaatggatgagagttagatatatggtaggtgtagatttttatttaagttttttaagttaaagatattgttgaaatatttggattattgacgttattttatagtaggtttttgtgaagtttaaatggagtgagttttgttttttttaattgttatttagtgtgttttataggtaatttttaagtaggaataataggagtatagtaatgtagtagaatttataaattttatttggtattgagaaaggttaagtcgagaggaaagtgattgttgttaattttattgtagtttgtgttggagtagggggtgttgtgtttggttttttgtatttgttgttattatttttgttatttgtgaaaggagtgtgatatggtggttataaggcgggttttgttgtattttttttagattgtggttttgggcgtttgtttaatttttttggggtagttttttttgggggttgagtgagtgaatgtatttggagaattaggtggtgtttatggtatgttgagtatttataaaggttattaattcgtgttattggttttttaattaagaatggggttatatattatttgtagtttttattattagtttggtagtatttataaacgtgtagtagtaatgtttgattggtggttttttgaagggattttatgggtatattgtgtatttgtttaaatttagggttttttatggatttataggattggtagttgtaggttagtaatgtatagtaattgaagttgggtttttaaattatttgtttttaaaaaaatattataattatttttaatatgtttttttttttttatgaattttattattaaatgtatttgaaattggaaatatatattaattttgattatatttaatggatttatgagatgggagtatttgttttagtagagtttttatatatggtttatgttggttataggtgttggtttttgtattaattaggattttgaagaggaaaataaatagtaggagatgggtagagatataaaagatttattataaggaattggtatatatagttatggggttgcgtagttttaagttttatatttagtaagttggagatttaggagagtagatgatgtgttttggtttgaaagttagtagacgtgagatttaagaggagtttatatttttgtgttagttcgaaggtaggaagagattagtgtttttattaggtagttaggtaggaggagttttttaggtcgtcgaggagttggtttgttatttttaggttttttgttgattggataaggtttttttttattttagagggtttttgttttatttagtaatttgtttaaatgtgtattttatttagaaatatttttagatatatttagaatattgttttattatatatttggtattttgaaatttagttaggttgaaatatgaatattaattattataggtttttttttattatcgatgtttttttagtaggtggggtatagtatataggattttttttatttttgaggtttttttagtaggtgggatatagtatataggttttttttgttattttcgaggtttttttagtaggtgggatatagtatataggttttttttgttatttttgaggtttttttagtaggtgggatatagtatataggtttttttttatttttgaggtttttttagtaggtgggatatagtatataggtttttttttttattttcgaggtttttttagtaggtgggatatagtatataggtttttttttttattttcgaggtttttttagtaggtgggatatagtatataggttttttcgggtttgggtaggaggtacgaaggtgatttatttttgtttgtttaggattgaggtggtttttgagatgtagaatttttggtttttaaattttgtttatgttttaggtaaataaggtaaattggttattttaggtagaatttttatagtagttacgttttgttaatttttttttttcgtatttatcggatttataaatttttttttgaatatttgatttttgatttaattttttttaaggtaattagtttttttttagataagtttttagagtgaggtcgtgatgggtttttcgtggattttagattataggttgtgtttttaaatttgttttttttaggaagtgtttttttcgttacgtggtgttggttttttttattggtgtattgtcgtagttcgtttttattttagagatatagaaaataagaagtttttagaaatgttagttttaggagttttatttttgaaatagaagtgttgacgtttattgtatagttatttttgggaatgatatattagtatttttatcgttattttataggttgtggggttaggtagtgatttagggagacgagtagtgagaaggaatggattaaatatttttcgagtttatcgagtttagttatcgttttttagttagagaaggtagttgtgggtttttttgtttttatatggatttttttttgttttatttttttttttattaagggtatcgttgttgtttatttgtttattttatatttacgtgtgtttacgagaaggatgggagggaaagtggggcggtaaagaataatttttgttattatttttcggtttaaaattttattaaagtttttttttataaagtgtttaagatgagggtttagtatattattttatttaaattataatattttatatatatttttataaatgtaaggggtataaaagtgttattttgttatatggatatatcgtgtagtggtgaagtttgggtttttagtgtatttgttattagaataatatacgtgttatttatagggtaattttttattattcgtttttttttattttttcgagtttttaatgtttattttatattttatatttacgtgtatgtattatttagtttttatatataagtgagaatatgtagtatttgattttttttttttgagttattttattttgataatggtttttatttttatttatgttgttgtaaaagatatgattttattttttttgatagttggggagtattttattgtgtatatgtattatattttttttatttatttatttattgatgaatattttagttgattttatatttttgttattgttattagtgttgtaataaatatatatgtgtaggttttttttaatatattgatttttttatattttatggagggaatagagtttttttaagcgagtgtggttggtttttattttttagtgtattttgtaattaatatttttgtatatttttttttaggtgattgggagattttaatttagatttttagtaagtgttataaggaagaaaagattttgaagaattaattaagtttttcgtgaagttaagtttaagtaatattttcgttttaattataagtaggagaaatgaagtatattattaattcgtatgaaaatattaataatatagtaagaaataatttcgattgttttcgtgtggttttgtcggaggagatattttttataatttttattgttggagttttggagaatttgatcgttttgttggttgtgtttaagaataagaatttttaggtatttatgtatttttttatttgtagtttggttatatttgatatgttgggtagtttatataagattttggaaaatattttgattatattgagaaatatgggttattttaagttacgtggtagttttgaaattatagtcgatgatattatcgattttttgtttgttttttttttgtttggttttatttttagtttgtttgtgattgttgcggatcgttatattattattttttacgtattgcggtattatagtatcgtgattatgcgtcgtattgtggtggtgtttacggttatttggacgttttgtacggggattggtattattatggtgatttttttttattatgtgtttatagtgattatttttacgtcgttgttttcgttgatgttggtttttattttgtgtttttatgtgtatatgtttttgttggttcgattttatattaggaagatttttattttttttagagttaatatgaaaggggttattatattgattattttgttcggggtttttattttttgttgggttttttttgtgttttatgtttttttgatgatattttgtttaagtaatttttattgcgtttgttatatgttttttttttaggtgaacggtatgttgattatgtgtaatgtcgttattgatttttttatatatgtttttcggagtttagagtttagggacgtatttaaaaagatgattttttgtagtaggtattggtagaatggttgatttttggttttagaatttatgggaataacgttgttaagtgttagaatagtgtaatattttaataaatgttagtgttttttattggttttttttttttaatggatgtaaggatgattttattagttagtgtttttaatagttaggttttatgtgaatagttttattgtaggggtaattttttaattttgtgattggatagataaaacgatgtagtaaaagaaggatagaatataaagtattaggtaggtataaaagtaattaaggtttttgttattatttttaatgattaaaaattgtaattatttttgtattaatttagtaaaatagtaataaaaatttaagggttttgggttaaggtaaagatttgtttttttgtggatatttaataagttagttttgaggtggtttttttaggtggaggttattgtagttaatttttagaagttaagtatttggatatgcgattttaggtagaagatgtagggtttttgtaagttaataataaattggaaggaatgtattgttgtagttgaatttgtttgttttttatagttatgtggaatttttatttttttttttttttttgttagtttgatgtattgatgttattttagttttagaaagtaggttgagtataaattataaatgttaaataacgagtttcgagtttttaatgataaatggattttttttgttagttttttttgtttatttagtattttattggttttaaaatttttttttgttatatttttttatgttttatgagtatatattttaaaggaagaaatgaaaatttaatttatttagtttttatgtgggaatatataaaggttagatgaaaattgttattatttgaagaagttgtaattaaattatgtgtgttataatgtagaagtataagaaaagagttttaatatgtattttaagaaataaagagagagagatagagatagatagagagagagagagagagagagagagagagtgt

SEQ ID NO: 30 - DNA, 6894 bp, Artificial Sequence
  chemically treated genomic DNA (Homo sapiens)
atattttttttttttttttttttttttttttttgtttgtttttgtttttttttttttattttttaaaatatatgttggggttttttttttgtatttttatattgtaatatatatagtttggttatagtttttttaaatagtgataatttttatttggtttttatgtatttttatatgggaattaaatggattaaatttttatttttttttttgaaatgtatgtttataaagtatgaggaaatgtaataggaaagggttttaaggttagtgggatattgagtgagtaaagaagattaatagagaaggtttatttattattggaaattcgaagttcgttatttgatatttatagtttatatttagtttattttttgaaattgaggtggtattaatatattagattaatagggagaaagaggagggtggagattttatatggttgtgggagatagataaatttagttgtagtaatgtattttttttaatttattattggtttatagagattttatattttttgtttggagtcgtatgtttaggtatttaatttttggaaattggttgtaatggtttttatttggaaaggttattttagaattggtttgttagatgtttataggaaagtaagtttttgttttagtttaaagtttttgaatttttattgttgttttattagattggtgtaaaagtaattgtaatttttggttattgaaagtaatggtaaaaattttaattatttttgtatttatttaatattttgtattttattttttttttattatatcgttttatttgtttagttataaagttaagaggttgtttttataataagattgtttatatagaatttagttattagaaatattagttggtgggattatttttgtatttattagggaaggaaggttagtgaggagtattggtatttgttggaatgttatattattttggtatttggtaacgttatttttatggattttaaaattagggattagttattttattagtatttgttgtagaagattatttttttgaatgcgtttttgagttttgggtttcggaaggtatatatgaaggggttaatgacggtattgtatatgattaatatgtcgtttatttggaagagagatatgtagtaggcgtagtaggggttatttgggtagaatgttattaagaggatatgaagtataaagggggtttagtagaagatgaagatttcgagtaggatggttagtgtgatggttttttttatgttggttttggggagggtggagatttttttggtgtgggatcgagttagtaggaatatgtgtatatagaggtataggatgaagattagtattagcgggaatagcgacgtgaaggtgattattgtgggtatatgatgggagaagattattatggtgatgttagttttcgtgtagaacgtttagatgatcgtaagtattattatagtgcggcgtatggttacgatgttgtggtatcgtagtgcgtggaagatggtgatgtagcggttcgtagtaattatagataggttgaagatggagttaagtagggagaggataaatagggagtcgatgatgttatcggttgtggttttaaaattgttacgtggtttgagatagtttatgttttttaatatgattaggatattttttaagattttatataggttgtttagtatattagatatggttaagttatagatgaaaaagtatatgggtgtttggagatttttatttttgaatatagttagtaggacgattagattttttaaaattttaataatggaaattgtgaaaaatatttttttcggtaaaattatacgaggatagtcggaattattttttgttgtgttgttgatgtttttatacgagttgataatgtgttttattttttttgtttgtggttaaggcggggatgttatttggatttgattttacggaaaatttgattgattttttaggatttttttttttttgtagtatttgttggagatttaagttaaaattttttaattatttaaaagggagtatatagaaatattagttgtaaagtatattagaaaataaaaattagttatattcgtttaaagaaattttattttttttataaaatataaagaaattagtatattagaaggagtttgtatatgtatgtttattgtagtattagtgataatagtaaagatatggaattaattaaagtgtttattaatgggtgaatggataaagaaaatgtggtatatatatataatggagtattttttagttattaaaaagaataaggttatgttttttgtagtaatatggatggaagtggaggttattattaaagtgaaataatttagaaagaggaagttaaatattatatgtttttatttatatgtgggagttaaataatgtatatacgtggatatagagtgtggaatggatattggagattcggaagggtgggagggggcgggtgatgagaaattattttatgggtaatacgtatgttattttgatgatagatatattaaaagtttaggttttattattatacggtatatttatgtaataaaatggtatttttgtattttttatatttataaaaatatatataaagtgttgtaatttaggtaaaataatatattgggtttttattttaagtattttgtgagaaaaagttttagtggaattttgagtcgagagatgatagtaaagattattttttgtcgttttatttttttttttatttttttcgtgaatatacgtgagtgtgggatgaatagatgaatagtagcggtgtttttgatgaaaaaagaggtaaagtaaggaaaggtttatgtgggagtaggagagtttatagttgttttttttgattgggaggcggtggttgggttcggtggattcgggagatgtttagtttatttttttttattgttcgtttttttgggttattgtttgattttatagtttgtgggataacggtaaaggtgttgatgtattatttttaaagatgattatataatgagcgttagtatttttgttttaaaggtggagtttttgggattggtatttttggagattttttattttttgtgtttttggggtgaaggcggattgcggtagtgtattagtggggaaagttagtattacgtggcgaggaagatattttttagggaggataaatttgggagtatagtttatgatttgaagtttacggggagtttattacggttttattttagggatttgtttggaaaggaattaattattttggaaaggattgggttagaggttaagtgtttagaaggaggtttgtgggttcggtggatgcggaaggaaggggttgatagggcgtagttgttgtgagggttttgtttggaatggttaatttattttgtttgtttgaaatatggatagggtttaaaagttagaagttttgtattttaggaattattttagttttgggtagatagggatgagttattttcgtgttttttgtttaggttcggggaagtttgtgtgttgtgttttatttgttggggaagtttcggggatgggaggggaagtttgtgtgttgtgttttatttgttggggaagtttcggggatgggaggggaagtttgtgtgttgtgttttatttgttggggaagttttagggatgggagggggtttgtgtgttgtgttttatttgttgggaaagttttagggatggtaggggaagtttgtgtgttgtgttttatttgttggggaagtttcggggatggtaggggaagtttgtgtgttgtgttttatttgttggggaagttttagggatgggaggggttttgtgtgttgtgttttatttgttggggaagtatcggtgatgggagggggtttgtggtggttggtgtttatgttttagtttgattgagttttagggtgttaggtatgtggtgagatagtgttttaggtgtgtttgagggtgtttttgggtgagatgtatatttgaataggttattgagtaaaatagaggttttttgggatgggggagggttttgtttaattagtagaaagtttgaggataatagattagtttttcgacgatttggggggttttttttgtttgattgtttgatggagatattggtttttttttgttttcggattagtatagaagtgtgagttttttttaggttttacgtttgttggtttttagattagaatatattatttatttttttgggtttttagtttgttgagtgtagagtttgggattgcgtagttttataattgtgtgtgttaattttttatagtaaattttttatgtttttatttattttttgttgtttatttttttttttagaattttggttaatataggggttaatatttgtggttagtatgggttatgtatggagattttgttgggatagatatttttattttatgagtttattaaatgtaattagaattagtatatatttttaattttagatgtatttgatggtaaaatttataaaaaaaaaaagatatgttgaaagtggttgtaatatttttttagaaataggtggtttgggagtttagttttagttgttgtgtattgttgatttgtagttgttaattttataaatttatggggagttttgaatttggatagatatatagtgtgtttatggggtttttttaaaaggttattaattaagtattgttattgtacgtttgtggatgttgttaagttggtggtgggggttgtaggtggtgtgtggttttatttttggttgaagggttagtgatacgaattggtggtttttatgagtgtttagtatgttatgggtattatttaattttttagatgtatttatttatttaatttttagaggaagttattttagaaaggttgggtaaacgtttaaagttatagtttggagaggatatagtagagttcgttttgtgattattatgttatattttttttataagtggtaagggtaataataatagatgtaagagattagatatagtattttttattttaatataaattgtaataaaattgatagtagttatttttttttcgatttggttttttttagtgttaagtaggatttgtaaattttgttgtattgttatgtttttgttgtttttgtttagagattgtttgtagaatatattaaatgataattagaagaagtaaaatttattttatttaaattttataaggatttgttgtgaggtggcgttaatgatttaaatattttaataatgtttttggtttaaagaatttggataggggtttgtatttgttatatgtttggtttttatttatttaaagtcgtttgttgtttttttttatttgtttttttgtgttttgatttttttattgtaaataatataggtttagagtttttttatttttttttagggtttgtggtttgttgggtaataaatgtttattttttaattttatgttgtttttttttgtttatattttattgaaatttgttttaagtttttgggtttaaggtatttttttattttagttttttaaggtattggggattatagatatgaattattttatttggtagagtgatttttaaattttatttttttttatgttattggaatttttggagttaatttttggttcgaagattaagttttattattttgagtttgtagtaaataaggttttagaaggttttaattttgtagtgttttttaggaggtagagatggggtggtggatgagaaaggagaaaagagataagttttttatagttttataatttgtatttagaaagaaatttggttgattcgtttgtttgaaggcgtaggttttggtaggtagagtagataattggggtagttataattgtttaagggattgtaaggaaaagtaaaatcgatttttgttttttggttgggaggggcgtataaattatcgagttaatagtattatagggtataagaatatggtttcggataatttaaatgtggttttaaatgtggtttattttgttagatgttttttggaaagtttagggagtatgggtttaaagtgagatttttatattgattattatttttgattaaaaaaaatatatatagtttttatattttttaaaggttttaagggtaaggagaaggttttattatgtgttaaatttttgttatgtgttagttggttttgtgttttgtgttgtgtatggtgggttttattttaatttttttgttgataatataagggagttttattttttttgatttatttttgatttgatttatttttgaggagttgaggtttagagattaagagatcggtttaaagttttataggttttgtgttgtatagttgggatttaaattaagatttgtttggttttaaaaatgattaattttagcgtttttatgaatatttatttgataaggaagttttaatggttttagtaaaaaaatgaatataaaataatttaataattttaaatttttgtatttgattaaattaggatggttttaaatttttttgttttttaaattttatttagagaaaaatttttttgaaatttagagaatagtaagatttgtagatattatttgtggtttaggaagggagttaatgttatagaaagtttttgagtagtagggttgtaggcgttttggggtttatgggttgtgtttttggggtttcgtggattttgttgaagataagttagtaatattgtgtcgtttttttttgcgttgttgggtgttttttcggattgtttttttggagaagagttggggaaggaggattgagtggttgagtattgtttattaggggtttttaggtttttttagagggtagttttgtaatttaggttttagagagagttagtgtaggattgtgtttttgagttttgggttttggtggtgggagttgtt

SEQ ID NO: 31 - DNA, 5659 bp, Artificial Sequence
  chemically treated genomic DNA (Homo sapiens)
taatgattatttttagtgtttagttttttttttaagtaaaatatataattaatgttaggtaagttttttttaatggttttttagagagttaaacgtttttatgttgagttggaaatattgatgtttttttttttttgagatagagttttattttgttgtttaggttggagtatagtagtacgatttcggtttattataatttttgtttttcgggtttaagtgatttttttattttagttttttaagtagttgggattataggtatgtattattatgtttagttaatttttgtagttttagtagagatagggttttattatgttggttgggttggttttaatttttgattttaggtgatttgtttattttagttttttaaagtgttgggattataggtacggtggtgttcgattgatttttttttttttttttttttttttttttttttgagacggagtttcgttttgtcgtttaggttggagtgtagtggtgtaattttagtttattgtaagtttttttttttaggtttatgttatttttttgttttagttttttgagtagttgagattataggtattcgttattatatttagttaatttttttgtatttttagtagagacggggttttatcgtgttagttaggatggttttaattttttgatttcgtgattcgtatattttcgttttttaaagtgttgggattataggcgtgagttattacgtttggttcgattttttttttaaatgttggtttttttggttttaatattttgttattattttgataattaagaaatatgtttttgttttaaataataaagattaagagattatttgttttaggtaaatagaaaaatttttattattttttttaatgtgtttagtaaaattataaaggtaattatgttttggggaattaattattttatatagtatgaagtaaataaagttattttgtttaataaattaaataatattagttagttgaggggtataaagaatgaattaattttttttttttgttttattaattttttaagttttatttttaagtatttttgatttaaagataagattgtttttttttgattatttaatttttattatgtttattattaaagttaaagtagatgtaataagttttaatattattgaatttaatattttaattaatagaaatatagattatatttaggttgggtgtagtggtttacgtttgtaattttagtattttgggaggtagaagtgggtggattttttaggtttaggagtttgagattagtttgggtaatatagtaaaatttcgtttttattaaaaattgaaaaaaattagttgggtatggtggtacgtgtttgtagttttagttacgagaaaggttgaggtgggaggattatttgagtttagggaggttaagtttgtagtgagtcgtgatcgtattattgtattttagtttgggtaatagaatgattttgttttaaaggaaaaaaaagaaagaaagaaaagaaatgtagattacgttttagtagtttgggtgaaagttatgaaaataatttacgggaaaaaataattagtttgtgaaataatttttgtaatataattaagagttagtgagaggaggtgatagttaattaagtatgtgaaatgaaatgttttgtagttagttatatttttaggagggttatttttagtttatgtagtttttataagttgttttaatgttataaaaatattatttttatcgagtttatattatttttttggagattgaagagatatttaaattaaatttttgagtttttttttttagtttatttaagttaatttataaaaatataggggaaagaatatagttttaaaaaattaaaacggaaaataaaaaatgtagaaattatagtatgaagttaagagtttaaataagtttataatattaaagatattttatgagtaaaataagaaaattaagtagtaattatttagtttattgattatggttttttttggaatgtagtgaaagatttagttttgttttttgtatttattataggtgttaagagtttaaggagggtttaagattaagggaagttaaatattgttagggaaagtaaatatatgtttaaattattatttttaaataagtttattatttataatttaaaattattaatttttatgtggtttttgtaagtattttttaattttatttttaaataaagagaaattattacggaagtattttttttagaagataatttataattattatttaattcgatttttttttttttttttttttggaaattttggtatatggatttgttattattgttaagaattatttagggttaggcgcggtggtttacgtttgtaattttagaagtttgggaggtcgaggtaggtggattatttgaggttaggagtttaagattagtttggttaatatggtgaaatttcgtttttattaaaaatataaaaattagtcgggtatggtggcgggtatttgtaattttagttatttgggaggttgaggtaggagaattatttgaatacgggaggcggaggttgtagtgagttaagatggtattattgtattttattcgtggtgatagagcgagatttcgttttaaaaaaaaaaaaaaaaaaaagagagacggagttttagttttgttgtttaggatggtatgtagtaatacgatttttgtttacggtaatttttgttttttgggtttaagtgatttttttgttttagttttttgagtagttgggattataggtatatattattgtgtttagttattttttgtatttttagtagagacggggttttatcgtgttggttaggttggtttcgaatttttgattttaggtgatttatttgtttaggttttttaaaatgttgggattataggtgtggtgagttattgcgtttagtttttttttttattttggggaatattttattttgtttatggagtagttgttgttttattattttatttttttaataaatttgtttatattttgtattgcgattcgttttgaattttttttgtatgagatttaagaatttttttttgtggtttggattgggattttttttttgtaataaatgtattggttgataggagaataaagaaaaaaaaagaggaaaaattagagtaatttttttatataattatattatatgatcgttttgttaattatgataatagttaataaaataatttttttatgtttaatttttagtttatgtttgtatgttttaaaatgttttttatagttggtttgtttaattatttaatgaaggattaaatattgtagttggttgttatgtatttagttttttaattttgatttttagattatttttagtttattttattatattcgttttaagttttttgagttagttaattttaatttgttatgtattttataaaatgttttttttttttttatagtcgattgtttttttgtttttggagtttttttttttattttttaaggttattttgagtatatttttttgtttcgtgaaatttatttttttttttttttttttttttttgagtttaattagttgttatcgtaggtttttgtttttttttatagtgtggttagaattcggttttgtttgttagtagagggtagggtcgttgtttttttttttttgtagtttttaagtttagtatatgtttggtatttagtggtagtataataaggaatttgatgaatattttttttttttgtttttcgttttttttttatagtttgttagttatggttaggaagagtaagattcggaatgggtttggtgtgtttcgcgggaaggtcgtgattttggaagatgttttttagtttagttcggattttttttttttagttttagagattttttttattttttgtgtatatatatatattaagatttaggaagtggtttttgaggtaggattttaagagtttaaggagtggggtcgaggttggaggtgtgggggtgtgacggtcggttttatttttcggtttgtttagattagttttttttggggattatttttggtatataagggagggaggtagtttgatttttttagttcgtttttagtttttatttggttttgttttttgggataagacggggaaatttagaggatgtaagttttttttgttttcgtgtttttttttaagttttcgttattatagacggatgtaggagttgtttgggaggttggaagtatagattttgttaatttttttttagagggcgggattcgacgcggacgtgttttgattgattgggtagcgtggtttcggggaagggtttttttttttttttttagattaggatttttggaaaatggagaagttgtgttaatagaggggggttagaaatttttattttagaatgttgtagaatgttgggagatatttaggatgtgagttagggattttttggaagtgtttgttttggttttattcgattttaggtagtttttagttgtttgtatagtcggatggggagggggtttgtatagagttggagttagaggagagagttggtttattttttacggtaggatggggaaattttatagattatattgttattcggttttagtttttcgtttcggcgtttagagggtaatttttatttatttcgttcgtttttttgaattagagtgatttaggttgcgtttcgtttcgtttttttatttcgagttggtacggaggtatagcgttagaggggggttttaggcgtttcgaggttttgtttttgcggttttttttttgcgggggtgggcgttttttttcgggtaggggttacgtggttttggtcgggcggggggttcggtttatttcgcgtcgggtttagtgatttaggtcgtagttgttatcgcgttatatgagggaggtcggcggttattcggcgggggaggggatcgtggttggagttcggggcggggtcgcgcggtaggcggggcgggagtcggggggcgtagttagagagtttcggagtcgcggcgggagaggaacgcgtagttagttttgggaagtttaggtgaggtcgcggggattcggcggatttcggcgcgggttgggagagattattcgtagtttttttttttagggttcgttttaggttcgcggagattcgttcggcgttttttagtcgttttggagtaattttgtttcgaagttttttgggttcgggtagggtgtggcgggggtgttggttgtattttttttttttttggtgggcggggaggttagagtttaggggaaaggggttggggcgggggtcggggttgggttgaagatcgtttttttaggttgggtgttgggtggggaaagggtgtttgacgttcggagattggcgggtcgagggtcggcgttaggtttaagtttttgtcggcgtttttggatttgttttgggttttagaggcggcggggcggggttcgggtttcgcggtcgtcgtttttattttttttttgcgggtaaagagggggttgggagacgtggattcgatcgcgggttttcgggtgggaggggtcgggaatcggggtcgtgaagggaagttttcgagggtcggtcgggagttcggaaatcgaggttttttttcggttagttttaattttttcgtttttttttttgttttagg

SEQ ID NO: 32 - DNA, 5659 bp, Artificial Sequence
  chemically treated genomic DNA (Homo sapiens)
tttggggtagaggggagggcggggggattaaaattggtcgaagggggatttcggttttcgggttttcggtcggttttcgagggtttttttttacggtttcgattttcggttttttttattcggaaattcgcggtcggatttacgttttttagttttttttttattcgtaggagaggggtgggggcgacggtcgcgaagttcggatttcgtttcgtcgtttttggggtttaggatagatttaagggcgtcggtaggggtttgagtttgacgtcgattttcggttcgttagttttcgggcgttaaatattttttttttatttaatatttagtttggagaaacggtttttagtttaatttcgattttcgttttagttttttttttttgggttttgattttttcgtttattaaaaaaaaaaaaagtgtagttagtattttcgttatattttgttcgggtttagggaatttcgaagtaaagttgttttagggcggttggagagcgtcggacgagttttcgcgggtttggggcgagttttggaggaagggattgcgggtggttttttttagttcgcgtcgaagttcgtcgggttttcgcggttttatttgggttttttaaggttggttgcgcgtttttttttcgtcgcggtttcggggttttttagttgcgtttttcggttttcgtttcgtttgtcgcgcggtttcgtttcgggttttagttacggttttttttttcgtcgagtggtcgtcggttttttttatgtgacgcggtaatagttgcggtttgagttattgggttcggcgcggggtgggtcgagtttttcgttcggttagggttacgtggtttttattcggaagaaggcgtttattttcgtaaagggaaagtcgtaagggtaagatttcggggcgtttggggtttttttttggcgttatattttcgtgttaattcggggtaggagagcggggcggagcgtagtttgggttattttggtttagagaagcggacgaggtgggtgagagttattttttgagcgtcggggcggagagttgaggtcgggtgataatgtggtttgtgaggtttttttattttatcgtaggggatgagttagtttttttttttggttttaattttgtgtaagttttttttttattcgattgtgtagatagttggggattgtttggggtcgggtggggttagaataaatatttttagaaagtttttggtttatattttgggtgttttttaatattttatagtattttagagtggggatttttggtttttttttattagtatagtttttttattttttagggattttagtttgagaaaaggggaggaagttttttttcgaagttacgttatttagttaattaagatacgttcgcgtcgggtttcgttttttgggggaggattgataaggtttgtgtttttagttttttagatagtttttgtattcgtttgtgatagcgagggtttgggggaagatacgaaggtaggagaggtttatattttttggattttttcgttttattttagaagataaagttaggtgagggttggaagcgggttagggggattaagttgttttttttttttgtgtgttaggggtggtttttagaaggagttgatttgaataggtcggagagtaggatcggtcgttatatttttatatttttagtttcggttttattttttgggtttttaaggttttgttttaagaattattttttgagttttagtgtatgtgtgtatataaagaatgaaagaagtttttagagttaaaggaaggagattcgggttgggttgagaagtattttttaggattacggttttttcgcgggatatattaagtttatttcggattttgttttttttgattatggttggtaggttgtggaggaggagcggagagtagaagaaaggagtatttattaggttttttattgtgttgttattagatgttaggtatgtgttaggtttgggggttgtaaggagaggaagatagcggttttgttttttgttagtaggtagaatcgagttttggttatattgtgaagaaaggtagaagtttgcggtggtagttggttaagtttagagggagggaaagggagaggagaatggattttacggagtagaaggatgtgtttaaggtgattttggagaataaaggggagagttttagggatagagaagtagtcgattgtggaaaaaaaaggagtattttgtaaagtatatggtaggttggggttggttggtttaaagggtttgggacggatgtggtgagatgggttgaaggtggtttgaagattaagattgagagattagatatataataattaattgtaatgtttggttttttattgaatggttgaataaattagttgtgaaagatattttgggatatatagatatggattgagaattagatataagaaaattattttgttaattgttattatggttaataaaacggttatataatatgattatgtagagaagttattttagttttttttttttttttttttttatttttttattagttaatgtatttgttataggaaaggggttttaatttagattataagagagggtttttggattttatgtaagaaagatttagggcgagtcgtagtgtaaagtataagtaagtttattaagaaagtaaagtggtgaaataatagttgttttatagatagagtaggatgttttttaaagtaagaggaggggttaggcgtagtggtttattatatttgtaattttagtattttgggaggtttaggtaggtggattatttgaggttaggagttcgagattagtttggttaatacggtgaaatttcgtttttattaaaaatataaaaagtagttgggtataatgatgtgtgtttgtagttttagttatttaggaggttgaggtaggagaattatttgaatttaggaggtagaggttgtcgtgagtagaaatcgtgttgttgtatgttattttgggtaataagattgaaatttcgttttttttttttttttttttttttttgagacggagtttcgttttgttattacgggtggagtgtagtggtgttattttggtttattgtaattttcgtttttcgtgtttaagtgatttttttgttttagttttttaagtagttgggattataggtgttcgttattatgttcggttaatttttgtatttttagtagagacggggttttattatgttggttaggttggttttgaatttttgattttaggtgatttatttgtttcggttttttaaatttttaggattataggcgtgagttatcgcgtttggttttaaataatttttaataatagtagtaagtttatgtattaaggtttttaagaaagaggagggaagagaatcgagttgggtagtagttataggttgttttttgaaaaaggtgttttcgtgatagtttttttttgtttggagatagagttaagaaatatttgtagagattatatgagaattaatgattttggattgtgaatggtagatttgtttggaggtgatgatttagatatgtgtttgttttttttggtagtgtttggttttttttgattttaagttttttttaggtttttgatatttgtgataaatgtaggaggtagggttgaattttttattgtattttagaggaggttataattagtggattggatggttgttgtttagtttttttattttgtttatagggtgtttttgatgttataggtttatttgaatttttagttttatattatagtttttgtattttttgtttttcgttttgattttttaaaattatgtttttttttttatgtttttataggttaatttggataagttgaaggaaagagtttaaagatttggtttgaatgtttttttaatttttagaaaggtaatgtaggttcgatggaagtaatgtttttgtgatattagagtagtttatgggaattatataggttggaaatgatttttttgagaatgtagttggttataaagtattttattttatatatttgattgattgttatttttttttattgatttttgattatgttataggaattattttataagttgattgttttttttcgtggattgtttttatagtttttatttaggttgttagagcgtggtttatattttttttttttttttttttttttttttttgagataaggttattttgttgtttaggttggagtgtagtggtgcgattacggtttattgtaggtttgatttttttgggtttaggtgatttttttattttagtttttttcgtagttaaaattataggtacgtgttattatgtttagttaattttttttaatttttggtagagacgggattttgttatgttatttaagttggttttaaatttttgggtttaagggatttatttatttttgttttttagagtgttgggattataggcgtgagttattgtatttagtttgagtatggtttatatttttgttggttaagatgttaaatttagtgatgttaaaatttattatatttattttaattttgataataggtataatgggaattaaataattaggagaagatagttttgtttttaggttagaagtatttagaaataaaatttggaggattggtggaataaaaaaaaaaagttaatttattttttatgttttttagttaattgatattatttagtttattaagtaagatgattttgtttattttatgttatgtggggtgattggttttttagggtatagttgtttttgtagttttgttaggtatattggagaaaatgataaggatttttttatttgtttagagtaggtggttttttaatttttgttgtttagaataagaatatgttttttggttgttaaagtggtggtagggtattaaaattagaaaaattagtatttaagaaaaaaatcgggttaggcgtggtggtttacgtttgtaattttagtattttgggaggcggagatgtgcggattacgaggttaggagattgagattattttggttaatacggtgaaatttcgtttttattaaaaatataaaaaaattagttgggtgtggtggcgggtgtttgtagttttagttatttaggaggttgaggtaggagaatggtatgaatttgggagggggagtttgtagtgagttgagattgtattattgtattttagtttgggcgatagagcgagatttcgttttaagaaaaaaaaaaaaaagaaagaaagaaaaaaattagtcgagtattatcgtgtttgtaattttagtattttgggaggttgaggtgggtagattatttgaggttaggagttgagattagtttagttaatatggtgaaattttgtttttattaaaattataaaaattagttgggtatggtggtatatgtttgtaattttagttatttggggggttgaggtgggagaattatttgaattcggaaggtagaggttgtagtgagtcgagatcgtgttattatattttagtttgggtaatagagtgagattttgttttaaaaaaagaaaaatattagtatttttaatttagtatgaaagcgtttagttttttagaaagttattggaagaaatttatttgatattggttatatattttgtttgggaaaaaaattaaatattaaaagtaattatta

SEQ ID NO: 33 - DNA, 6112 bp, Artificial Sequence
  chemically treated genomic DNA (Homo sapiens)
atttataggggtagggttgtagggtatttgtaggagttgggagtttgggggatttggtggagttgggagtaattgttgttaattttttttaagagtttgtttttgaaaaaggtaatggaagggaaggaggtattgaaatggtaggtggtaggttaggcgtggtggtttacgtttgtaattttagtattttgggaggttgaggtaggcgaattaggagattaggagatggagattattttggttaatatagtgaaattttgtttttattaaaaatataaaaaattagttaggcgtggtggtgggtgtttggagttttagttattcgggagggaggttgaggtaggggaatcgtttgaatataggaggcggagtttgtagtgagtcgagattacgttattgtattttagtttgggtaatagagtaagattttgttttaaaaataaataaataaaaaatataaaaagtagttgggcgtggtagtaaacgtttgtagttttagttatttaagggattgaggtgggaggattatttgagtttgggatgtcgaggttgtagtgagttgtgttaatattattggattttagtttggttaatagagtgagtttaaaaatatatatttatatttttatatatttatatattaaaaaatataaaaaagtggcgagtgatagttgaggagattattgtagtgggaattttaggagggggtgaggaggggttcgttggtataggggaaggggtgttatagagaaagattttggtttttttggggttttggagtggtagagagagtttaggatgtttgtaaatgtatagaaattagagggtgggaatttttttgggaggtttgtttttttttatgaaggagaagatagagtaattttgttgatagggagggtagagaaggagaggtgaggggtttgagggaagaggtttggtatagaggttggggagagggaaatgagagcgtttaggagtttttggaagatgatttgggttagtagttggggttgttattagggtagttgttgggagggtagggtatttggaggttttaaatttgtattattatagatttttttttagtagggtttaattttttggatggagaggtttgggaggtgtagtagggaagttggggatgacgttgatttggggtttataatatttttttttagtaggtttaggggtttgtagttgttggtaacgggttgattttatttttgggtgaataggtgaagtttttcgggttgtttcgggaagataaaggttgggttttttggtttcggtttttgggattttgagatatagatgttttttttgggaaaggttcgttaatatattaagtaaggtttggtaagggaggaagagtttagggtttttttttgatatttgggggaaagtgttggggaagatttgggtagtatttaaaggttttagtgaatttaaagatagaaggaagatagaaggaggttggattggtaaagggaattttatagtagatattttaggtttttatatttagtagatttggagttttggaagttgaggttgtgaattttttttcggttagttggggtgtttagttttgttttgttcggtttatatggtagggatttattttgtaggttttgtgggttgggtgttggttgggtttggttagttttatttgtaatttagggggaggagtaggggagatataggatgtttttaattttttgattttttgaagtttttttggtattagttcgggtttttattatagtttttagtggaagagtttggaaggggggtagttgttttttgtttagttttttcggttttttagtaattttattttttatgttattacgtttttgcgttaagtttttttttttttaaatatttaatgtgattttttttggttagttggagtttaattgagatatttattttttagaagtttagttttgggaagtggagttaatttttggaagtttgtagattttttttagtgggttgttagattttagtatgagtatgaggtttattatggtttattgggttttaggggttagaagtgtttatgggtgttttaagtgggtgttttattatataggttttatggggggtagttagattatagtagtagatagagttgggtcgggtttatgtaggtttaaagaagtagttagtggttatttaaggtagtggtatttttgtagttttttggttggtgtttgagattagttatattttttataataattagagttatgtttatattttttattattatttagttttttttttgttaaaacgtggagtattgttttttagttttggagtttaggggtagtagataatttgagttagttggagtaggtggggtcgtttttggttggaacggttatggaaaattttaattaaagatagtatttgggagaatatttatgaaaatgtgaaagtttatatttttgatttagttgttttatagatatgatttgtgtaaaataacgtaagtgagaatatttgttatagtagtttgtaatggttaaatatagtaaaaaattttaattatttagtaatggtgattagataaattgtgatttttttatataaggaatgttatgtagttattaaaaagaatgaggtagttttatatgtgttgatgtaggatgagttataagatatatatagttaatataaaagaagagtttagaatagtgtatatgatagcgtttgtattaaatataataaatatatttgtttatttgtacgtacggttgaatttggaaggatatataagagattgttattgttttgagattgggaggtttaggggataggaacgggagggagattttttattgtgtatttgtttgaattttttgaattttgtattatgtgtatattttataatttaataaatatttatgtttttaaaagaaaataaaaaagtatttagaaataaataggttagacgtggtggtttatttttgggaggttgaggagggaggattgatatagttggggatgttaaggttgtagtgagttatgattttgttattgtattttagtttgggtgatagagtgagattttgttttaaaaaaaagaaattgggatgatatagtagtgtttttatttatattttacgtttttattgttagttatgcgatttttggataagttaatttatttttatgttttagtttttgtaaaatagtggtaattttttggaaaggttattttgaagagtaagttaattaatatgtaaagagttggaagagcgtttggtattgaattagtattatgaagtgttagatattgttattttgttgttttagattaattttaaagtaacgttatttgagttatgtcggttttttttgttgttgtttttatttaaatattttatttatttaataaataattttatttttttttttttttttttttttgagatggggtttcgtttttgttttttaggttggagtttaatgacgcgatttcggtttattgtaattttcgttttttgggtttaagcgatttttttattttagtttttcgagtagttgggattttaggcgagcgttattatgttcgttaattattttttgtgtggagatagggtcgtattatattatttaggtcggttttaagtttttggatttaagcgatttttttgtattagttttttaaagtattgggattataggtatgagttatcgtattcggttttaataaatgtttttttttttgagacggagtttcgttttgtcgtttaggttggagtgtagtgggcgatttcggtttattgtaattttcgttttttcggtttatgcgtttcggttttttaaaatgttgggattgcggatttgagttatcgcgttcggtttgaggtgatttttaataagtatagtcgtagttgtagatattttggttttgtaggaataatgaggtatggatggatttatagttggatttatggatgggatggattttcggtaggttttggacggagggaaatgttttggtttgttaagttcggtatcgagtgagatttatttataaagttaatcgtggaagttattggcggtttttttcgttttgtcgtcggggaattttgtcggtggttttcgatttgttttcgggttatttggtgatattgatttcgtagttattattttaattggcgtattcgatttaaataataattagggaatttgtgggcggttaaaggttcggttttgcggtcggtttttttaggtttttttttttgttttgtgaggttagaaagttattttttcgaggtcgttttttatgtcgagaaatatttttcgtttgaggttttgtggggtaggggaggttcgtgtattttttatagaaaatttcgtatagattcgcgattgtttttattaatagtttttaggagattgtttgtagtcggggggttgtcggttttatgttcgcgggtaagtagggataagttgtgtttttaaaagggttaacgggaatttcgcggtttttgaattttcggtgttggcggatttttcgttttagggttattaggagtcgcggcgtgagtgcgtgtcgggatcgagcgcggggtttttgaggaattttaaggttgtttaagtttacggatttagttatattggcgaatcggagatcgttcgattttattattttcgcgttttttttatagtcggcgttaaaaacgttagttttacgacgtaggtcgggattcgcgcgtttacggtttaattagcgcggattttgtataaagcgagtttcgtttttacggcgtcgttgttagtttttttttttttcgtggtcgtttcggttcgtttatttttcgtttcgcgtcgtttacggttagaggttcgcgattggtttatggggacggtcgcgagttttggttggtcggcgcggagttacgagggcgtcgtcgtcgtttttttataggcgattattgggtaggtttagtttttcgttttagtttcgagttttcgttggttttcgggtgtacgtgtttcgggatttttagtattcgcggtcgttatcgtcgtcgtttggttttttttggatttatttgcgttatttgttcgttttatatttcgtcgttattatggtgaagttcgcgaaggtaaacggttttgagcgcgagcgtagacgtgtaggtttgtttttcgaggggcgagcgcggcgtcgcggggaggagggtttgcgcgtagtttcgggcgcgttttagggcgttatgttgcgggaagtttcgcgcgattagtggggaggtttcgcggtttttggttatttggtggcgaggtgaagagtttttgtaggtgttgggggcggcgaacgcggcgggaaagatagagttattgagcgcggggagggggcgttgggtttcggggtggagagatgagattaaatttttgcgacgcgtacgagttgggattcgatttttgacgtacgtgttcgggagcgcggtttgttacgtgggtcgcgtcgcgtgggttttggaatttttagagggatcgggtgttttgggtcgggaaatggcggtatcggttttagtcggagtttcggttgcgttcggatgttttcgtttcggtttggtaagtcgatacgtggtgggtttcggaaggtggttttgtcgcgtgttttttgcgttgtgtttcgggtacgtggtggtttattaggtatttttacgtggtcgcgtcgtttttttaaggggcggggttgtttcgttgggaaaggtataagttttatgagaaaattaaggtagttatttttttaagtgttttaatgatttttatcgttaatttggatttagatgagggtggtagaataaagtatcgggatttgtagtattaaaatacggttgtgtttaattaaggtaacgggaggagaaattatttttttaggttgattttttattttagggtaggttttttgttggtaaagtttgggaggaaaaatgtgggcggttgagagtagttttttttgtattgttattaggagtagtttttatgttagttgtggtgtttggtattatgagaaatggatttgaggacggagatgatggcgtatgaatattaatggtaaaatatggggattttttagtagatt

SEQ ID NO: 34 - DNA, 6112 bp, Artificial Sequence
  chemically treated genomic DNA (Homo sapiens)
ggtttattagaggatttttatattttgttattagtgtttatacgttattattttcgtttttagatttattttttatagtgttaaatattataattaatatagaaattatttttgatggtaatgtaagagggattatttttaatcgtttatatttttttttttaggttttattaatagaaaatttgttttaaggtaaaaagttaatttgaggaaatgattttttttttcgttattttagttaagtataatcgtgttttaatattataaatttcggtattttattttattatttttatttgaatttaaattaacggtgaagattattaaggtatttaaaaaaatgattattttgatttttttatgaagtttatgttttttttagcgagataatttcgttttttaaagaggcggcgcggttacgtgggggtatttggtaggttattacgtgttcgaaatatagcgtaaaaggtacgcggtagagttatttttcggggtttattacgtgtcggtttgttaggtcggggcggagatattcgagcgtagtcgggatttcgattagggtcgatatcgttatttttcggtttaaggtattcggtttttttggagattttaggatttacgcggcgcggtttacgtggtaggtcgcgttttcgggtacgtgcgttaggagtcgagttttagttcgtacgcgtcgtaaaagtttggttttatttttttatttcgaggtttagcgtttttttttcgcgtttagtgattttgtttttttcgtcgcgttcgtcgtttttagtatttgtagaagttttttatttcgttattaagtagttagaagtcgcgagatttttttattaatcgcgcgagatttttcgtagtatggcgttttagaacgcgttcgggattgcgcgtaggttttttttttcgcggcgtcgcgttcgtttttcggaaagtaggtttatacgtttgcgttcgcgtttaaggtcgtttattttcgcgagttttattatgatggcggcggagtgtgaagcggataagtggcgtagatgagtttagaagaagttaagcgacggcgatggcggtcgcgggtgttgaagatttcggagtacgtatattcgaaggttagcgagagttcgagattgaggcgaaagattgagtttgtttagtaatcgtttgtggaaaggcgacgacggcgttttcgtgatttcgcgtcgattaattaaagttcgcggtcgtttttatgagttaatcgcgagtttttaatcgtgaacggcgcggggcggggagtaggcgggtcgaggcggttacgggagggggaggggttggtaacggcgtcgtgggggcggggttcgttttgtgtaaggttcgcgttgattgggtcgtgggcgcgcgggtttcggtttgcgtcgtgggattggcgtttttggcgtcggttgtgaggggagcgcgggggtggtggaatcgggcggttttcggttcgttaatgtggttgggttcgtaggtttgggtagttttggagttttttagagatttcgcgttcggtttcggtacgtatttacgtcgcggtttttggtggttttggagcgaggagttcgttagtatcggaagtttagggatcgcggagttttcgttggtttttttggaggtatagtttatttttgtttgttcgcgagtatggggtcggtagtttttcggttgtaggtagttttttgagagttgttaataaaggtagtcgcgggtttgtgcgaggttttttgtgagaaatgtacgaattttttttattttatagaattttaagcgggagatatttttcgatatggggaacggtttcggagaagtaattttttggttttatagggtagggagaggggtttgggagggtcgatcgtagagtcgggtttttgatcgtttataggttttttggttattatttgggtcgaatgcgttaattaaggtggtggttgcgaagttagtgttattagatggttcgggagtaggtcgagagttatcggtagggtttttcggcggtagggcgaaggaggtcgttagtgatttttacggttagttttgtgggtgggttttattcgatgtcgggtttagtaaattagagtattttttttcgtttagggtttgtcggggatttattttatttataggtttagttatggatttatttatattttattgtttttatagaattaggatatttgtagttacggttgtatttgttaaaaattattttaggtcgggcgcggtggtttagattcgtaattttagtattttgggaggtcgaggcgtatgaatcggggaggcggaggttgtagtgagtcgagatcgtttattgtattttagtttgggcgatagagcgagatttcgttttagaaagaaaagtatttgttaaggtcgggtgcgatggtttatgtttgtaattttagtattttgggaggttgatgtaggaggatcgtttgagtttaggaatttgagatcggtttgggtaatataatgcgattttgtttttatataaaaaataattagcgggtatggtggcgttcgtttggagttttagttattcgggaggttgaggtgagaggatcgtttgagtttaggaggcggaggttgtagtgagtcgagatcgcgttattgaattttagtttgaggaataagagcgaaattttattttaaaaaaaaaaaaaagaaagaaaataaaattatttgttaaatgaatgaagtatttaggtagaagtagtagtagggagagtcggtatggtttaagtggcgttgttttggagttggtttggggtagtaaaatagtaatatttaatattttataatgttgatttagtgttaggcgtttttttagttttttatatattaattaatttattttttaaaataatttttttaaaaagttattattgttttatagaaattgggatatagaggtaaattaatttgtttaggggtcgtatagttagtagtggaggcgtaggatataagtgaagatattgttgtgttattttagttttttttttttgagatagaattttattttgttatttaggttggagtgtagtggtaggattatggtttattgtagttttgatatttttagttatattaattttttttttttagttttttaaaggtgagttattacgtttggtttgtttgtttttaaatgtttttttgtttttttttgaaaatatgagtatttattgaattgtaaagtatatatatagtgtaaaatttaaaagatttaaatagatgtataataaaaggtttttttttcgtttttgttttttaggttttttagttttaaggtagtggtagttttttgtatatttttttagatttagtcgtacgtgtaaatagataagtatatttgttatatttaatataaacgttattatatatattgttttgagttttttttttgtgttaattatatgtattttgtaatttattttatattagtatatgtagagttgttttattttttttaatagttatatggtattttttgtgtggaaggattataatttatttagttattattgttggatagttagggttttttgttatgtttggttattataaattgttatagtaaatatttttatttacgttattttatataaattatatttgtagaatagttgggttaagggtatggatttttatatttttatagatgtttttttaagtgttgtttttggttggggttttttatggtcgttttagttaagagcgattttatttgttttagttggtttagattatttgttgtttttgagttttaaggttgggagatagtgttttacgttttagtagaggaagaattagatggtggtgagaggtgtgagtatggttttaattattgtggggagtgtgattagttttagatattagttaagaagttgtagggatattattgttttgagtggttattggttgtttttttgggtttgtatggattcggtttaattttgtttgttgttgtggtttggttgttttttatgaaatttgtgtagtgaggtatttatttgggatatttatgggtatttttgatttttgagatttagtaggttatagtgggttttatatttatgttaggatttgatagtttattggagggggtttgtaggtttttaaggattaattttattttttaggattgggtttttaggaaataagtgttttagttaggttttaattagttaagaaaaattatattgagtatttaaaaaagagggagtttagcgtagggacgtggtgatatgagggatagaattgttgagaagtcgaggggattgagtaggaagtagttgttttttttttaggtttttttattgaaggttatgatgagggttcgggttgatgttagggaagttttagaaggttaggaggttggggatattttgtgttttttttgtttttttttttgagttgtaggtagggttggttagatttagttagtatttagtttataaagtttgtagggtgagtttttgttatgtaggtcgagtagggtagggttgggtattttagttggtcgggagggagtttatagttttagtttttagagttttaggtttgttgagtgtgaaggtttggggtgtttgttatgaagttttttttattagtttagtttttttttgttttttttttgtttttgggtttattgaggtttttggatattgtttagattttttttaatatttttttttagatgttaaagggggattttaagtttttttttttttgttaggttttgtttagtgtgttagcgagttttttttagaggaggtatttgtgttttagggttttaggagtcggagttagagaatttagtttttgttttttcgaggtagttcgagaagttttatttgtttatttagaggtagagttagttcgttgttaataattgtaggtttttgagtttgttggaggagggtgttgtgggttttagattaacgttatttttaatttttttgttgtattttttaggtttttttatttaggaggttgggttttgttggagagaaatttgtgatgatgtagatttggggtttttaaatgttttgtttttttagtagttgttttggtagtagttttagttgttagtttagattattttttaggagtttttgaacgtttttatttttttttttttagtttttatgttaagtttttttttttaggttttttatttttttttttttgttttttttgttaatagagttattttatttttttttttatagggaaggataaattttttagagggatttttattttttgatttttatatatttgtagatattttgagttttttttgttattttaaagttttaaggaaattagagtttttttttatagtatttttttttttgtgttagcgagtttttttttatttttttttggggtttttattatagtgatttttttagttgttattcgttatttttttgtgttttttggtgtgtgggtgtgtgggggtgtgggtgtgtgtttttggatttattttgttggttaggttggagtttagtggtgttaatatagtttattgtagtttcgatattttaggtttaggtgatttttttattttagttttttaagtagttaagattataggcgtttgttattacgtttagttattttttgtattttttatttgtttgtttttgagatagagttttgttttgttgtttaggttggagtgtagtggcgtaatttcggtttattgtaagtttcgttttttgtgtttaagcgatttttttgttttagtttttttttcgagtagttgggattttaggtatttattattacgtttggttaattttttgtatttttagtagagatagggttttattgtgttagttaggatggtttttattttttgattttttgattcgtttgttttagttttttaaagtgttgggattataggcgtgagttattacgtttggtttgttatttgttattttaatattttttttttttttattgttttttttaggaataagtttttgggaagagttgataatagttgtttttagttttattaggttttttaggtttttagtttttgtaggtgttttataattttgtttttgtaggt

SEQ ID NO: 35 - DNA, 6271 bp, Artificial Sequence
  chemically treated genomic DNA (Homo sapiens)
  unsure (4779)
agtggtataaatatggtttattgtagtttttattttttgggattaagtaattttttagttttagttttttgagtagttgagatgatagttgtttatcgttatgtttagtaaatttttttattttttgtaaagatacgattttattatgttggttaggttggttttgaatttttgggtttacgcgatttatttgttttagtttttaaagtgttgggattataggtttgagttatggtgttcggttatatttatggatttaattgtttttggaattaatatcgtgtaggaaaggagtaggattgagtagaaaaagttgaattaaatgtagttatagtaaatgttttagttttcggattttaagggagttttggtgttaggagagttttttagagtagttttattttgagttttgtatttgttagttagtgtagacggatttggtgagaggtagttttttttagttgaaggtaatttttggaaagggatttagttgataggtgttgataagtaatgcgtttagtagttgaggaaatgagtattttagttttgaagagtggtgtgttttttggtatgttgggatggttggttgtgttagtggagatgggggtggtgggtagaatgaagggaatattattgtaaaagttttttattttttatttatatttatttatttatttattttttaagataaggtttaattttgatgttcgggttggagtgttggaatgtaatgatattattatagtttattgtagttttgattttttgggtttaagcgatttttttattttagttttttaagtaattggaattataggtatatgttattatgtttagttaattaaaaaaaaaaattttgtagagatgaggtttcgttatgttgtttagggtggtttggaatttttgggtttaagtgatttatttattttggttttttaaagtgttgggatgataggtatgagttacggtttttagtttggaataaaatttttcgaagaaaaaattggtagagtttgttgtttgattaaaaaatagaggttgaatgagagagatgtatttaaaataatacgaaatattaagggttttttgaatattgttggatagtgtaaaatgggggaagttaggatataaatttaattttgttttattgtaaggtttatgtttttttattagattagtgttggttaaattggtgttttatgggttatatttagatagtagacgtattttgtttggttatatagtatttaaaaaatgtaaattggttgttattatgtaaaaattggaagagtttatatgtaagtttagatttttagttttttttgagtaattagaagatttagtaatattgggttaatatttttgtatggtagtaattggagttgagtgatagatattttttaaatggagagagtattttttatttggataaatggaggtgggtatatgttttttaatttattatagtttttatgtattattttttttggtattttttttttgagatggagttattttgtcgtttaggttggattgtagtagtataatttaggtttattgaaattttagttttttgggtttaagtaatttttttgttttagttattttagtaagtagttgggattatagttatgtgttattatgttcggttttttttttttttttttttttttttagtagagatggagttttattatattggttaggttggttttaaatttttgattttaggtgatttgtttgtttcggttttttaaagtgttgggattataggtatgagttatagcgtttagttttttttggtatttttgtttagtatttttgttatatgtattatgtatggtttaataaagtatataatatataataggtatttgggtatttttatttttatttattttttagagatagggttttgttttgttgtttaggttggagtgtagtggcgagattatagtttattgtagttttgatttttttagtttaagtgatttttttattttagttttttaagttgttgggattatagatgtatattattatgtttaattaatttaaataattttttttggtagaagttgggattttattatgttgtttaggttggtttgaatttttaggtttaagtaatttttttatttcggtttttaaaagtgttggtattataggtgtgagttattacgatcggtttatttggatatttaatattggtttagtagaattgaatgaatttaattggagaggaagttggggtgaagtttaggtttttgattataatgagaggtttggtattgaggggaggtaatagaatagggagtataaattaggatgaattaatgatatgttggtaggagtttgagtaaaggaagaagagtagagggttagggtttgaagtttgggtgttttattatagagttaaagaagagtgggtaatggtagattaaattagagaagaagaggagagaaaggtatagaggaattttagtaacggaatgttagggaaggtaagggagttgagggtttgggtagttgtatttagtgtagggaagaagattagggagatagataggtaaaaagttatggtaataaggaagtagttagggatttttagaggaagtatgagaaaaggagaggaaggttataggtttgaagtttagtagtgtagtagggggtattggaatattattttgggggtatgagtgagtgtttttttaggggttttatttgggagaaatatagatagatatttatttaatatttatttatttttttttagtatagttattattttgatattatttaaaagaaattagtatttgtattgtatttttaaagaagaagggataaaagatatgtttaaattgtttgtttgttttagtggaataaaatattaatttaatatgtattttggataattattaatttagagattggaaattttttttaaggatatatttttttgtatgtgggttattggttttgtggtttttttgtaggaaaattaaaattttagttttgtttttttttattatttagtgtttgtgtggtttaattggttgattagcgcgtgtttggaatgtgtaaatttattttaatattggtttaggggtttgtgtggtagtttatttttgttattttagtattttgggaggttaaggtagggggattatttgaggttaggagttttagattagtttgggtaatatagtaagattgtgtttttattaaaaaaaaaaaaaaaaaaaaaattagttaaagtagggtgatatttatttgtagttttagttatttaggagtttgaggtgggaggattatttcggtttaggagtttgaggttggagtgagttatgattgagttattgtattttattgtatagagttagattttgtttttgaaaaataaaaatatttgtttaggtaaaatgtatcgaggaagataaattttaaaattatttattttaggttaggtgcggtggtttatatttgtaattttagtattttgggaggttgaggtgggcggattatgaggttaggagtttaagattagtttggttaatatggtgaaatatcgtttttattaaaaatataaaaattagtcggttgtggtggcgtatgtttgtagttttagttattcgggaggttgaggtagaagaattattttaatcgggaggcggaggttgtagtgagtcgagatcgcgtttttgtattttagtttgggtgatagggtgagattttgttttaaaaaaaaaaaaaaaaaaattagttattttaaagtttaatgttagatatagattattcgttgttttggatgtaattttttttttggaaaattggtataatttaattatatatgaaatttttttaattttggtattggaggtatagggaaggattttgttttaggagatttatagtttatttttattgttttaggagttaaattacgttggtttatattttgattttgttatttgttaatttagattttgggtaaattaaaggtttgagggaggagtgtaggtttttagcgtttttacgggggtggggacgtgacgtatttattagtttatgaagttaatgatatgtattgaaaaggtttgtttaaggatttaaataagacgatgaatatattgaattaataatgaatgtaaggttttaaaggtgttttgagggtggtgaaatttgaattttttattaattgtgtaatagttatattaatttggatggttatgagttttgtagaggaaagttgggtttaaattttaatgttagatttggtggttagattttgattgttatcgggtttagtattgggatttaagcgatttttaaaaaaaaaaaattacggaatttttttttggttttttttttttgttttttagtagtttattaagttacgaagaatttgaaaatcggaggtcgtgtattttattttttttgagagtttaagttgagagtatagtttttttaggagattagcggtagagattcgcgcgttgggagaaaggttagttttagggcgttttaatttttaatttcgggagtaatttaaattcggaggtcggcgggggaggggatagttgtagggggcggtggggatgggagtggatgttttcgggttagttttggtattcgttagttgagtttagcgttagtttaggtgagttttacggcggtgagggacgttcgttagacggtttagaggagttagatgacgttatttttaggaggattcgtttttttattaatgaaatcggtcggcgcgggcgtatgcgcggnaggtcgttttttttttcgtttttttttttttttttttagtcgcgtttttaatttttagttcgttcgcgtttttttttttcgggtcgtggaaaggattttattttcggtggggtgttatggcggcgtttcggattgtgatggttgtggggagacggcgttagtggggagagcgattaagaggttttttttttttttcgggttttttttttttatttttttttttttagtttttttgttaacgttttttttttttttttttttttcgttcggcgttgattttttatttttattttcgtgggaatattgggagtttgtattttatagattttttttttgtttttttttttattttagttttcgtttttcgtttttttttcggtttagggcgtcggtttattttttttttcgtcgtttttcggtcgcggggaggatatggtcgcgtataggtcggtggaatgggtttaggtcgtggttagtcgtttcgacgagtaggtaatcggttcgtggcgggcgggaggtgggagcggagtgggggtggggatagagtaggtgaggggaggtaggagcggtcgtttttttcgcggttgttttaggttttggaggaaaggaagggaagggaagagaagggaaggggggataagtgggggtggttaaggcgggaggtgaggggtaggaggggatagttgggagtttgggtatttttttttttttaagtcggggggtggggttttgtttttgattagttttcgattttttattttttttattttagttttttcgtttggaaatggggatgagtgatttgggggcgtttttaggggcgcgttatttggatttaataattatttttttatttttgtttttgagtagaggtgggtaacgtttaggggttttttttttttttttttttcgtgatttttttaattggggacgagcgaattttaaggtttgttttatatattttttataggagaacgataatatttcgttttttttttagtttttttagtttttttttttggagggggaagagtagaagaaagtaaggaaggtataggtttttttattttttgttttatcgttttattttgtttcgagagttttaagtgtatatttattgtatatttttgtgatgttttataacgtcgttttttatattttgatgatatagattgttttttttttttattgtcgtttgtagtggaaatcgtggttttgaaatattttttttttttttgataattgtagttttttttttttttttttttttttttgttagcggtttgaggatgtgatgtattttcgagtgagaatgttggggagtaaaggggagaagggtgaaaggaaagtgagaaattgttttagagttatcgataatagagtaaagttagttgggatgtggttttggagcggattattttgttagtgtttgtggttgtttttgatttttttttggttgataagagaatttttattgagaatatttgggatg

SEQ ID NO: 36 - DNA, 6271 bp, Artificial Sequence
  chemically treated genomic DNA (Homo sapiens)
  unsure (1493)
tattttaaatatttttaatgaaagtttttttgttaattaggagagagttaaaaataattataaatattagtagaatgattcgttttaggattatattttagttggttttgttttgttgtcggtggttttgaagtagttttttattttttttttattttttttttttttattttttaatatttttattcgagaatgtattatatttttagatcgttggtaaaaaaaaaaggggggggggaagagattgtaattattaaggaaggggaaggtattttagaattacggtttttattgtaaacggtaataaaaaaaaaaggtagtttgtgttattaggatatgggggacgacgttgtagggtattataaagatgtgtagtgagtgtgtatttgaagttttcggggtaggatgagacgatggagtagaaagtaagaaaatttgtgttttttttgtttttttttgtttttttttttttaggagaggaagttgaagaaattgggggaggggcggaatgttatcgtttttttatagagggtatataagataggttttagggttcgttcgtttttagttaggagggttacggagggaagaggaagagagaatttttaaacgttatttatttttgtttaaaaataaaagtaagggggtaattattaaatttagatggcgcgtttttaaaggcgtttttaggttatttatttttatttttaagcggaagggttgggataaaggggatggagggtcggaggttggttagggataaggttttatttttcgatttaggagggaaagggtgtttaagtttttagttgtttttttttattttttatttttcgttttggttatttttatttatttttttttttttttttttttttttttttttttttttttagagtttgaggtagtcgcgggggaggcggtcgtttttatttttttttatttattttgtttttatttttatttcgtttttatttttcgttcgttacgggtcggttatttgttcgtcgaagcggttgattacggtttggatttattttatcggtttgtgcgcggttatgtttttttcgcggtcggggggcggcggagggaagggtgggtcggcgttttgggtcgggaagagggcggggagcggaggttgaggtgagggaagaggtaaggagagggtttgtggagtgtaggtttttagtgtttttacgggggtggggatggggggttagcgtcgagcgggagggggagagggaaagggggcgttggtaaggaggttggggggagggggataggggaaggggattcggggaggggagggggttttttggtcgttttttttattagcgtcgtttttttatagttattatagttcgagacgtcgttatgatattttatcggaagtgggattttttttacggttcggggagagggagcgcgagcgagttagagattgagagcgcggttgggaaaggggagggggaagcgagagggaaggcggtttntcgcgtatgcgttcgcgtcggtcggttttattaatgaaaaagcgagtttttttggaggtgacgttatttaatttttttgggtcgtttggcgagcgttttttatcgtcgtggggtttatttagattggcgttgggtttagttggcgagtgttagagttgattcgggagtatttatttttatttttatcgttttttatagttgttttttttttcgtcggttttcgggtttggattgttttcggagttggaagttagggcgttttggggttagttttttttttagcgcgcggatttttgtcgttaattttttggggaggttgtgtttttagtttaagtttttagaaaaaataaggtatacgattttcgatttttaggtttttcgtagtttggtagattgttgagaaataaaaaaggaaggttaaagagagatttcgtgattttttttttttagaggtcgtttaaattttaatgttagattcggtggtaattaaggtttagttattaggtttagtattgggatttaagtttagtttttttttgtaaaatttatagttatttaagttaatataattattgtatagttgatgagagatttaagttttattatttttaaaatatttttaaggttttgtatttattattaatttaatatatttatcgttttatttaaatttttgaataaatttttttaatatatattattaattttatgaattgatgaatacgttacgtttttattttcgtgggaacgttgggagtttgtattttttttttagatttttgatttgtttaaggtttgagttgataggtggtaaagttaggatgtaaattaacgtggtttaatttttagaataatagaggtagattatgggttttttaaaataaagtttttttttatatttttaatattagagttgaaaggattttatgtgtaattgggttgtgttagttttttaggaagaggattatatttaaaataacggataatttatgtttgatattggattttggaatgattaatttttttttttttttttttaagatagagttttattttgttatttaggttggagtgtagaggcgcgatttcggtttattgtaattttcgtttttcggttgaagtgatttttttgttttagtttttcgagtagttgggattataggtatgcgttattatagtcggttaatttttgtatttttagtagagacggtgttttattatattggttaggttggttttgaatttttgattttatgattcgtttattttagttttttaaagtattgggattataggtgtgagttatcgtatttggtttggaatgagtaattttaaaatttgtttttttcgatatattttatttaggtaaatgtttttgttttttagagataaggtttgattttgtgtagtggagtgtagtggtttaattatagtttattttagttttagatttttgggtcgaagtgatttttttattttaagtttttgaatagttgggattataggtgagtgttattttgttttggttaattttttttttttttttttttttggtagagatatagttttgttatgttgtttaggttggtttggaatttttggttttaagtgatttttttgttttggttttttaaagtgttgggatgataggggtgagttattatataggtttttaggttaatgttaaaatgaatttatatattttaagtacgcgttaattagttagttaagttatatagatattgggtgataagggagaataaaattagaattttaatttttttatagaaaagttataaagttagtagtttatatatagagagatatatttttgagaaaagtttttaatttttaggttggtggttgtttaaaatatatattaaattaatgttttattttattagaatagatagatagtttggatatgttttttgtttttttttttttaaggatgtaatgtagatattaattttttttagatgatgttagaatgatgattatgttggaaagaaatggatgaatattaaatgaatgtttatttatgttttttttaagtaggatttttgaaaaagtatttatttatatttttaagatagtattttagtgttttttattgtattgttaaattttagatttatgattttttttttttttttttatattttttttgaaagtttttaattatttttttgttgttatggttttttgtttgtttatttttttgatttttttttttatattggatgtaattgtttaaatttttagtttttttgttttttttggtatttcgttgttgaagtttttttgtgttttttttttttttttttttttagtttagtttattattgtttatttttttttagttttgtggtaagatatttaaattttaggttttggttttttgtttttttttttttatttaagtttttgttagtatgttattaatttattttaatttgtattttttgttttgttgtttttttttagtgttaaattttttattatagttagaggtttagattttattttaattttttttttaattaaatttatttagttttgttgaattagtattaagtgtttaaatgggtcggtcgtggtggtttatatttataatgttagtatttttagaggtcgaggtgggaggattgtttgagtttagaagtttagattagtttgggtaatatagtgagattttagtttttattaaaaaaaattatttaaattagttaggtatagtggtgtgtatttgtggttttagtaatttgggaggttgaggtgggaggattatttgagttagagaggttaaggttgtagtgagttgtgatttcgttattgtattttagtttaggtaatagagtaagattttgtttttaaaaaataaataaaaataaaagtatttaaatgtttgttatgtattatgtattttgttagattatatatagtatatatggtaggaatgttaaataaaagtgttaaagaagattggacgttgtggtttatgtttgtaattttagtattttgggaggtcgaggtaggtagattatttgaggttaggagtttgagattagtttggttaatgtggtgaaattttatttttattaaaaaaaaaaaaaaaaaaaaaaaaagtcgggtatggtggtatatggttgtaattttaattatttattagggtgattgaggtaggagaattgtttgaatttaggaggttgaggttttagtgagtttagattgtgttgttgtaatttagtttgggcgatagagtgattttattttaaaaaaaaaatgttaaagaaggtaatgtatagagattgtggtgaattaagaagtatatatttatttttatttatttagataagagatattttttttatttaaagagtatttgttatttaattttagttattgttatgtaggaatgttgatttagtgttgttagattttttagttatttaagagaagttagagatttgaatttatatgtaaatttttttaatttttatatagtggtagttaatttatattttttaaatgttgtgtagttaaataaaatacgtttgttgtttgaatgtagtttatggaatattagtttgattagtattagtttagtgaaaaggtatgagttttatagtagaatagaattagatttgtattttaattttttttattttgtattgtttaatagtatttagggaatttttagtgtttcgtattgttttaaatgtattttttttatttagtttttgttttttggttaggtaataagttttgttaatttttttttcgaagagttttgttttaagttgggagtcgtggtttatgtttgttattttagtattttgggaggttaaggtgggtggattatttgagtttaggagttttagattattttgggtaatatggcgaaattttatttttataaaatttttttttttaattagttgggtatggtggtatgtgtttgtggttttagttatttgggaagttgaagtgggaggatcgtttgagtttaggaggttaaggttatagtgagttgtgatggtgttattgtattttagtattttagttcgggtattagagttagattttgttttaaaaaataaataaatgaataaatataaataaaaaataaaaagtttttatagtagtattttttttattttgtttattatttttatttttattggtataattaattattttagtatattaaagagtatattattttttaggattaaggtgtttatttttttagttgttgggcgtattatttgttaatatttattagttaaatttttttttaggagttgtttttagttgaagaaagttgttttttattaggttcgtttgtattgattggtagatgtagggtttagggtggggttgttttgaagggtttttttggtattagagtttttttaggattcggaagttgaggtatttgttgtaattatatttagtttaattttttttgtttaattttattttttttttgtacggtgttgattttaagggtaattaaatttatgagtgtggtcggatattatggtttagatttgtaattttagtattttaggagttgaggtaggtggatcgcgtgagtttaagagtttaagattagtttgattaatatggtaaaatcgtatttttataaaaaataaaaaaatttgttggatatggcggtgagtagttgttattttagttatttaggaggttgaagttggaggattgtttgattttaggaggtagaggttgtagtgagttatgtttgtattatt

SEQ ID NO: 37 - DNA, 8693 bp, Artificial Sequence
  chemically treated genomic DNA (Homo sapiens)
agtttggataagatagcgagatttcgttttaaaaaaaaaaaaaaaaaaaagtataggaatgaggtattggagttagtagttgtagttttttaagagttaagttttttgtattggaggatatttagtgtatatgtgttattgatggttatggtttgagtaggtagtttgagttttttaggttgttttgagggtttttgttgatgcgagtttttattgaaaagtttagttgaggatattgtgttgaggaggttgtgggagggaggaagtatcgagtcgggtatgggagttttttcgttgtttgtgagttttttttttttgttgaattagtttttatttgattttttttaatcgttaggtgatagagattaggaagaaagaggttttatatatgtttttcgaggatgtgtttgtggagaggtttaggtgaggagaggacgggggacgtggttagggatttttagggtagttgagtaagtaggtgggtggtttgaggttaggaggggttaatgttaggaggtttagatttttgtggatttaagggtagaaggtgggttttgttgtggtttaggagttttgggtaaagtttaattttattatattattgtagtttatgtttcgagtatgtaatgttgagttatgtttgtagatgagatatagttttcgggggttttggttaagtttatgttaaatgtattttggaggagttatttttgataagatattattgtaaatttaagtaatgttttcggattatagtgggtgttgtgggttagtgttattttaatattagaggaatttaagggaaagatgttttgtaaaattaaaatgtttaatagtaggggatggttttataaattatggtttatttatatagtagataattatgataatgttttagaagaatatttaatgtaaaatatttattatataaataggttaataaaatagattatagaatagcgggtggggaaggggatatttgtgtatatttaaaaatacgggattaagttgggtgcggtggtttacgtttgtaggtttagcgatttagaagattgagtaggaggattttttgagtttatgagttcgagataattatgggtcgtaaagtaagaatttatttttataaaaaatgtttaaaaattttgttcgggttggtatagtgatttacgtttgtaattttagtattttgggaggttaaggtgggcggattatttgaggttagaagttcgagattattttggttaatatggtgaaattttatttttattaaaaatataaaaattagttaggtatggtggcgtatatttgtagttttagttattttattcgggaggttgaggtaggagaatttgtttgaatttaggaggtaaaggttgtagtgagtcgagattatgttattgtattttagtttgggtaatagagtaagattttgtttaaaaaaaaaaaaaaaaaattaggtcggttatagtggtttatgtttatgtaattttagtattagtattttgggtggttgaggcgggtagattatttgagattaggagttggagattagtttggttaatatagtaaaattttgtttttattaaaaatataaaaattagttaggtgtggtggcgtgcgtatgtaattttagttatttgggaggttgaggtaggagaatcgtttgaatttgggaggtagaggttgtagtgagttgagattatgttattgtattttagtttgggtaatagggagagatttggtttaagaaataattataataataaataaataaataaataaaattagttaggtatggtggagcgtatttgttgggaggtagagtaggaagattattttagtttggtaggttaaggttgtagtgtgttatgatggtgtttgtgaatagttattgtattttagtttgggaaatatagtgaggattttgtttttaaaaaataaaaagggggagggaagatggatttttaatttgttttatgagaatagtataattttttgatatttaaattagataagaattttataagaaaggaaaattataggtttattttatgaatattaatgtaaatgttttaaataaaatattagtaaattgagtttagtgttttttgtataaggataatatattataattaaattgggtttaatttaagaagttatggtaggtttaatattaaaaaattaataatgtaataatttattatattattagaataaaggtgaaaaattatgttatgttagataattaaaggtatttgttttaggtttttaaagaggagttagtggtataaggatgtaagggtagtggtgatttttttttagtggtattagttgaagtgagaatggtagcgttttattttggggatagaagtgacgtttatgttagacgtttgtggttttgatatgttttttgtggttttttgtggtttgttttttttttttttattggatgtgattttggttatggttttagttatattgtgtttttgtttatttttagattttggttttttaatttgtttagtgatttttttttttttttagatggagttttgttgtgtcgttaggttggagtgtagtggcgcgatttcggtttatcgtaattttcgttttttaggtttaagcgatttttttgttttagttattcgagtagttgggattataggtgtgcgttattacgttcggttaatttttgtatttttagtagagacggggtttcgttattttggttaggaatgtttttattttttgatttcgtgatttgtttaatttagttttttagagtgttgggattataggcgtgagttattgtgtttcgtttatttagtgattttaaatgtagtttaatggttttttagtttatggaggttaaagtaggttttgttgtattaaattaagaaattgggttgggtgtggtggttaatatttgtaattttagtattttaggatattgatgtggattatttgagtttaggagtttgagattagtttaggtaatatagtgaaattttgtttttattaaaaataaaaataaaaataaaataaaaaattaaaatttaaaattagttgggtatggtggtatgtatttgtggttttaggtatttaggaggttgaagtatgaggattatttgagtttaggaggtggaggttgtagtgagtagtgtttatattgttgtattttagtttgggtaatagagtgagattttaatttaaaaataaataaatagaatgagagagagagagaagaaaagaaagaaggaatttagttaaagaagttgggtttatttggattttttttggtttgttttatttgttgttattagtagttttttgaagttataaaaataatataaagtaaaataaggtaaaattattatttgtttgaaagagtttataaatttgatggtggtcgtggggtggatggaagattaaaaaaatggggatagaagtgaattagtgtaagttatttgtattgataagatggggatggatttttgtggaaggtagaggaggttatgttttatgtttttggtaggaaaagtggttaaagagggttttagagaataggggttgatggatgggttatattttgatgtgagttaagtttttggatggttggagagaggaaggatgttttagttgggggaatagtttggataatggagatttaagaaagttatgttttagtagtgtgaatgttgtggatgttgaagtgttaggatgtaaggtggagaattgggaaatggttttggaaaggggcgaaagtcgggtgatgaagtattttgtttattgtgacggagtttggattttttttgtggtttaaagggaaaggattgttgaatgtaaagttaatgttattagaaaagttgaatttataagagagttttggagtttaaaagagtattttatggggaattaggaaagttttggtatttggtagattaagtaagtgttttgatttgaagtttagtttagttttaatatttttttttatatttattatatcgtataatttggttttgtttatttattttaggttaaggtagagttttttagtttggtttgagtgttgtatttttttttttggtttgatatttggaattaaagttaagttagaattttagggttaagggggatgttgaaaattgtttgagtttttagattattttgttagtttatggtaaagggagggattagaggttatagggaaagtattttagttgttttttatagtattattttttttttatttaatggtttaggttaataggattttttttttgaggtttgggatacggaagggagttttttttaaattaggtttttggagagtaggttttaggggagtagtgtaatttatttttatatttataagacggtttttgatttttgttttttttttttttttttaaagtggaatagagagaatatgattttttacgatttttatattatagtttttaaataatggggaaatcggaggttttttcgtgtgtagacggtgatatttatcgttaaatgcgaattaggtagatgttagttttagtacgtacgtaggtaattttattttcgttttaacgattttagaggttgttcggtttgttttatacgggggtgttaagtttttcgttcgttttaagcggagatttaacgttatttataattaagttttttttgagggcgagcggttaggtgcgttttcggtaggatagtgttaattttagtttttttttagcgcgttttttcgcgttcgtttttcgtttggaagttttttttttacgtttcgcggtttttttttttttggttcggggagttgttttttgtgttgtcgggaaggttaaagtttcgcgtttattaggagagttcggtaagtatataaggatagaggagcgcgggattaagcggcggcgaaggaggggaagaagagtcgcgatcgagagaggtcgtcgagcgttttcgtttttagagagtagtttttcgagataggtaagggcgtagcgtgggggattcgtgtttttttttcgggattttttgttttcgttttcgcgatgtagtcggtcggtttcggtttcgaaggcggatttgggcgtttttggtttttcgcggtttcgagttttcgataaattttttgcgtcgattgcggtatgagaagtcgttagtagttgagttggagggtttacgttcggtttttgggcggacggtcgcgaagttgtaggcgttgtttttagggagtcggcggtttttttttttttaggggttcgcggcggttcggaggtttcgagagtttgttaggaggttttgggataattcggtttttttttttttttttgagacggagtttcgtttttgttgtttatgttggagagtaaaggggtgatttttgtttatcgtaattttcgtttttcgggtttaagcgatttttttgttttagtttttcgagtagttgggattataggtatgcgttattacgttcggttaatttttgtatttttagtagagacggagtttttttatgttggttaggttggttttaaattttcgataataggtgattcgttcgttttggttttttaaagttttggtattataggcgcgagttatcgttttcggttagttcggttttttagtattttttgtttttagtttttaggataggtgttatattttgaaagttaaattttatatacgttatcgtaaattaatgttggaaacggggtagtagagaaaaggataaaagttataatgaacgttttgtttttcggattttttcggatttagatttttgaatttttgtttttttgtttattttagcgtattcgaggtggtcgcgttatgataattatatgataattgggttaattataatgtagaatagttgggttttttttttttaagatttagttggggttaaaaataggtggtcggggcgggatttgttttagattttgaaacgtattgtttagtttcggatgttttaatagaatcggggtggacggtttatggcgtagattttgggttgagggtacgggtagttatttaggaatgattaaggtttaggtaagggggcgtttttagcgaaggagagatagtttatttggtatttggattttttaaattttttatgtttaaatggggtagggagggtttttatagaatggttggaaggagttaaggaaaataaaagtgtgtgtggattttttttgtgtgtgtgttagtttataaattttgtatagattatggttattttaatgatttattgtttttttgatgtttttgttataggattcgatgtatgtatgttatggtgtaaggataaaattcggtttttgtgtttttttaatttttataaaaggttatggttagcgtgtagttttatagtaataagtaaaatgatttgttgagtttatagagagttttttatatttatgaagttttaataagtgtagttttattataaagttaattttaggatgagtaaattttaagtttttatttttttagagttttttatttttggattataatattttttttatttaaaaaagtataatatttgatatttttttaataatttgttgttttaaaaatgatataaaaggtattatttgtttattgtagagaattgaaaatatatataagtaaatatatatatatataagtaaaatatataatataaatataagattattttttagggaagaatttgaagttttagtaatagtagttatttaattagtttagtaatagaatataagttttgagagggtgggagtgaatatgttattatattgtataatatagtatatagggtataaggaggggaaatgttttttggggttttttaggaaggtttgaagttattgtttttagtaaatggaaattattttagagtagttatttttgataagaattgaaatataattgagggaattattagatttgtaagattttgtttttttttttattaatatgttattttatatttgtatttggtgatatacgtaattattatttttttgtgattgtaatatttgggtattttttagagttaaatgtgttatggttaatttggagttttaatttaattgtttggtttattaagttttggttgtgtatttgaatagattattggtagggtataatgggaatagtttgttttttggagttaggagaggatattaaggttgattaaagttcgtttagttgtttttttagtcgaagcgtatttgggttagttattggttgttagtgttatttaatggttgttttgaaaatgtttagttttgttcggtaattttttagaagttagtatcgtgtaggtttagcgtttggggaatagggcgagggtggggtagagagaaggaagtggttttttgaagtagaaattagcgttttagaggatttttatttttaaagttttttttatataaaaaagatttggtttacgtttttttaaatgagagatttattttaggtaaatttattttaaaatgttagcgtttattaggagtgataagatatttagttatttacgttttaatgtgaattattttttttatttaattatatttttttttagtagttggttgagaagattttttgaaatttaaaatgattgtagggttggcggtgagttgattttcggtttcgaggtggttttagggggtttatttggttaagggaaatttggtagtgcgagggtagtgttggagagaggggtgggtatagggggttaggggtattatggatgttttttttttattgttttttggtgttttgattttagtttttgtttataggtatttgttggattttttaaaagtatttgtagtggttgttttattaggaggtaatttttttttggttttttttttttttatatttgtattttttttaaattttgttattttagattatatttgagagttttagagaataagatatttgatacgtgacgtgtttagaagatgagttagattttaaagaattgagatttgttttaaaaacgaagttttttaaagttattggagtttgggtaatagtgattattagagtaatttgtgtgtaggatattaaattaggttgttcgaaatgttgtttaaattggttagtggttttatttgtttttttgttaatttaatatttataggaaatagagttttagaggaatgataggattttggtggaataaaaagggaaaagattattttgagtaggagttttagggtttttcgttttttttaagttatttttatttttgagattttgtatgttagaattatagtttaatgtagtgaaataggaaagttttttgttaggagtttagttttattttgttatggatattaaagtaattgtttttttttgggttttaatttttttattttttatgggaagggttgaattaagtaatttttaaaatagtttttagttttaatttttttaggggtttcgtttaaatagaagataatagggaaatggttatagtttatttattatttttttttttttattataatttatattatcgttgtattgtatatttttttttttagtattgttgttgtttttaaaatgtttttaattttataagagagtgtgttgttaatgttggtttaaggttttttttggtgagtggttaatattgttttgttttttgtaggggttttattaattttgtttgtttttgtaga

SEQ ID NO: 38 - DNA, 8693 bp, Artificial Sequence
  chemically treated genomic DNA (Homo sapiens)
tttgtagaagtaaataagattggtgggatttttgtaaggagtaaaataatgttggttatttattaggaaggattttgagttaatattaataatatatttttttgtggagttaaaggtattttaaggatagtagtaatgttgagaaaggaggtgtgtagtatagcggtggtataagttgtgataaggaggagggaatggtgggtaaattgtgattatttttttgttattttttatttaaacgagatttttaaaaaggttaaggttggaagttattttggggattgtttggtttagttttttttatgagagatgggaaaattgaagtttaaagagagataattattttaatgtttatgataaggtaaggttaagtttttaatagagaatttttttattttattatattaagttgtagttttaatatgtaagattttaggagtgaaagtaatttgggaaaaacggaggattttgaaatttttgtttaagatggttttttttttttttattttattaggattttattatttttttgaaattttattttttatgaatattaggttgatagaaaagtaaataaaattattggttaatttaggtagtatttcgagtagtttgatttgatgttttgtatataaattattttggtgattattattatttagattttagtaattttggagagtttcgtttttaaagtagattttagttttttgaaatttggtttattttttggatacgttacgtgttagatgttttgttttttagagtttttaaatgtggtttgaaatggtaggatttgaagaggatgtagatgtggaggggaaagagattagaagggaattattttttggtggaatagttattgtagatatttttggagaatttagtaagtgtttgtgggtagaagttgaggttaagatattaggggatagtaaggagggggtatttatggtgtttttagttttttgtatttatttttttttttagtattattttcgtattgttaaattttttttaattaggtgggttttttgaagttatttcgaggtcggagattagtttatcgttaattttataattattttggattttagaagatttttttagttagttgttagaaagaaatgtaattagatgagaaaagtaatttatattaaagcgtggatgattaagtgttttgttatttttaatgaacgttggtattttaaaataagtttgtttaaaataaattttttatttggggaggcgtgggttaaattttttttatataggggaggttttggaagtgaaagttttttgaagcgttgatttttattttaggaggttatttttttttttttattttattttcgttttattttttaggcgttgggtttgtacggtgttagtttttgaagggttgtcgggtaaggttgagtatttttagagtagttattagatggtattggtagttagtgattggtttaggtgcgtttcggttaaaggggtaattgaacgagttttggttaattttggtgtttttttttggttttaagggataggttgtttttattgtattttgttagtgatttatttaagtatatagttagaatttggtggattaggtaattagattaaagttttaagttgattatagtatatttagttttgaaaaatgtttagatgttatagttatagaaaaatggtagttacgtatgttattaaatgtaaatgtaaagtaatatattagtaaaggaaaaaataaaattttataggtttgatagtttttttaattatattttaatttttgttaaagataattattttggagtgatttttatttgttagaagtaatgattttaggtttttttggaaagttttagagagtattttttttttttatgttttatgtgttgtgttgtataatgtggtaatatatttatttttatttttttagagtttatattttgttgttaaattggttagatggttgttattgttaaaattttagatttttttttgaaagatggttttgtgtttgtattgtatattttgtttatgtgtatgtgtatttgtttatgtgtatttttagttttttataatgaataaatagtattttttgtgttatttttaaagtaataaattattggggaaatattaaatgttgtgtttttttaagtagggaaagtattataatttaaaaatggaaagttttggaaaaatagaaatttgaaatttgtttattttgagattaattttatagtagaattatatttattagaattttataggtgtgaggggttttttatgagtttaataaattattttgtttgttattgtaaaattgtacgttggttatgattttttgtaaagattagaggagtataggggtcgagttttgtttttatattatgatatatatgtatcgagttttataataaaagtattaaaggaatagtaagttattaaagtggttataatttgtgtagagtttataaattgatatatatataaaaaaaatttatatatatttttattttttttggttttttttagttattttgtaagaattttttttgttttatttaaatatgaagaatttggggaatttaaatgttaagtggattgtttttttttcgttgaaaacgtttttttatttgagttttgattatttttaaatggttgttcgtgtttttaatttaggatttgcgttataaatcgtttatttcggttttgttgaggtattcgaaattagatagtgcgttttaggatttaggataagtttcgtttcggttatttgtttttaattttagttaggttttggagagaagagatttaattattttgtattgtaattgatttagttattatgtaattattatagcgcggttatttcgggtgcgttaaggtgggtaaggaaataaggatttaggggtttgaattcgaaaaaattcggaaggtagggcgtttattatgatttttatttttttttttgttgtttcgtttttaatattaatttgcgatagcgtgtatggaatttgatttttaagatgtgatatttattttggaaattgggagtaagagatattaaaagatcgggttggtcgggggcggtggttcgcgtttgtaatgttagaattttggggggttaaggcgggcggattatttgttgtcgggagtttgagattagtttgattaatatggagaaatttcgtttttattaaaaatataaaaattagtcgggcgtggtggcgtatgtttgtaattttagttattcgggaggttgaagtaggagaatcgtttgaattcgggaggcgaaggttgcggtgagtagagattatttttttgttttttagtatgggtaataagagcgaaatttcgttttaaaaaaaaaaaaaaagatcgggttgttttaagattttttagtaagttttcggagttttcggatcgtcgcgagtttttgggggagaggaggtcgtcggttttttggagatagcgtttgtagtttcgcggtcgttcgtttaggggtcggacgtgggttttttagtttagttattggcggttttttatgtcgtagtcggcgtagaaagtttgtcgagaattcgggatcgcggagagttagaggcgtttaggttcgttttcggagtcggagtcggtcgattgtatcgcgaggacggggataggggatttcggggaaagagtacgggttttttacgttgcgtttttatttgtttcgggaggttgttttttgagggcggggacgttcggcggtttttttcggtcgcggtttttttttttttttttcgtcgtcgtttggtttcgcgtttttttgtttttatatatttgtcgagtttttttggtgggcgcgggattttgattttttcggtagtataaggagtagtttttcgggttaggggaaggggggtcgcggggcgtgggaggggggtttttagacgggggacgagcgcggggagacgcgttggaaaggggttggaattagtattgttttgtcgaaggcgtatttggtcgttcgtttttaggaagaatttaattatggatggcgttgggttttcgtttagaacgggcgggaggtttagtattttcgtgtggggtaggtcgggtagtttttgaggtcgttgaggcgagggtgaagttatttgcgtgcgtgttggggttggtatttgtttggttcgtatttggcggtaaatattatcgtttgtatacggggaggttttcgatttttttattgtttggaaattgtgatgtggaagtcgtggggaattatattttttttgttttattttggggaggggaggagggagtagaagttaggagtcgttttgtgggtgtgaaggtgagttgtattgtttttttggggtttgttttttaagggtttggtttaggggaggttttttttcgtgttttaagttttaaggaaaaagttttgttaatttaaattattaaatggggagagggtgatgttgtgaagagtagttgaagtgttttttttgtggtttttgatttttttttttgttatgagttggtagggtggtttggggatttagataatttttaatattttttttggttttggagttttggtttggttttagttttaaatattagattagagagaagagtatagtatttaaattaagttaagagattttattttaatttggagtaaataaataaaattaaattgtgcgatgtggtgggtgtgggagggagtattgggattaaattggattttaaattaagatatttgtttaatttgttaaatgttagaatttttttgattttttatgagatgtttttttggattttaggatttttttgtggatttagtttttttggtgatattggttttatatttagtaattttttttttttggattataagagagatttaagtttcgttatagtagataaggtgttttattattcggttttcgtttttttttagggttattttttagttttttattttgtattttggtattttagtatttataatatttatattgttagaatatggtttttttgggtttttattgtttaagttgtttttttaattagaatattttttttttttttagttatttaggagtttgatttatattaagatgtagtttatttattagtttttgttttttgaagttttttttggttattttttttattaggggtatgaggtatgattttttttgttttttatagaagtttatttttattttgttagtgtaagtggtttgtattaatttatttttgtttttatttttttaattttttatttattttacgattattattaggtttgtaaatttttttaagtagatggtggttttgttttattttattttgtgttatttttgtaattttaggaggttgttggtggtagtagataaaataaattaggaaaaatttaaatggatttaatttttttaattgggtttttttttttttttttttttttttttttttattttgtttgtttgtttttgaattagggttttattttgttgtttaggttggaatgtagtagtgtgaatattgtttattgtagtttttattttttgggtttaagtgatttttatgttttagttttttgagtatttggaattatagatgtatgttattatgtttagttaattttgggttttggttttttgttttgtttttgtttttgtttttggtagagatagggttttattatgttgtttaggttggttttaagtttttgggtttaagtaatttatattagtattttgaagtgttgggattataggtgttagttattatatttagtttagttttttaatttaatgtagtagaatttgttttggtttttatgaattgaaaggttattgaattgtatttagaattattgggtaggcggggtatagtggtttacgtttgtaattttagtattttgggaggttgagttgggtagattacgaggttaagagatggagatatttttggttaagatggcgaaatttcgtttttattaaaaatataaaaattagtcgggcgtggtggcgtatatttgtagttttagttattcgggtggttgaggtaggagaatcgtttgaatttgggaggcggaggttgcggtgagtcgagatcgcgttattgtattttagtttggcgatatagtaagattttatttaaaaaaaaaaaaaaattattgggtaggttgggggattaggatttaaaaatgggtagggatatagtgtggttggaattatggttaaaattatatttagtggagaaaaaaaaaatagattataaggggttataaggggtatgttaagattataggcgtttgatatagacgttatttttgtttttaggatgggacgttgttatttttattttagttaatgttattagaaaggagttattattgtttttgtatttttgtattattagtttttttttgaaagtttagaataggtgtttttgattgtttgatatgatataattttttatttttattttagtaatgtggtgaattattgtattgttgattttttggtgttaaatttattatggttttttagattaaatttaatttgattatgatgtattatttttatatagaaagtattggatttaatttgttaatattttatttaagatatttgtattgatgtttatgagatgggtttgtaattttttttttttgtggaatttttgtttaatttgagtattaaaaaattatgttgtttttataaaataagttggaaatttattttttttttttttttttattttttaaagatagggtttttattgtgttttttaggttggagtgtagtggttatttataggtattattatagtatattatagttttgatttgttaggttaaagtgatttttttgttttgttttttaataggtacgttttattatatttggttaattttatttatttatttatttattattataattattttttagattaagtttttttttgttgtttaggttggagtgtagtgatatgattttagtttattgtaatttttgttttttaggtttaagcgatttttttgttttagttttttaagtagttgggattatatgcgtacgttattatatttggttaatttttgtatttttagtagagatagggttttattgtgttggttaggttagtttttaatttttgattttaagtgatttgttcgttttaattatttaaagtgttagtgttgggattatataggtataagttattgtgatcggtttaattttttttttttttttttagatagagttttgttttgttgtttaggttggagtgtagtggtatgatttcggtttattgtaatttttgttttttggatttaagtagatttttttgttttagtttttcgagtagagtagttgggattataggtgtgcgttattatatttggttaatttttgtatttttagtagagatggggttttattatgttggttaggatggtttcgaatttttgattttaagtgattcgtttattttagttttttaaagtgttgggattataggcgtgagttattgtgttagttcgggtaaaatttttaaatattttttgtagagatgggtttttgttttgcggtttatggttgtttcgaatttatgggtttaagagatttttttgtttagttttttgagtcgttgggtttgtaggcgtgagttatcgtatttagtttagtttcgtatttttaaatatatatagatatttttttttttattcgttgttttgtgatttattttattgatttatttatgtaatgggtattttatattaaatatttttttaaaatattgttatgattgtttattgtatggatgggttataatttataaagttattttttattgttagatattttggttttgtaaaatattttttttttgagtttttttgatgttgaaatgatattggtttatagtatttattatgattcgaaaatattatttggatttatagtaatgttttgttaggaatgatttttttaggatgtatttagtatgggtttggttaaagttttcggaggttgtgttttatttgtaaatatggtttagtattgtatgttcgaggtatggattgtagtaatgtgatggggttgaattttatttaggatttttggattatagtagagtttattttttgtttttgagtttatagaagtttgagttttttggtattgattttttttgattttagattatttatttgtttatttagttgttttggggatttttgattacgtttttcgttttttttttatttgggtttttttataaatatattttcggggagtatgtatggagtttttttttttttggtttttattatttggcggttgggaggaattagataagagttggtttagtagggagagggagtttataggtaacgaaagagtttttatgttcggttcggtgtttttttttttttatagtttttttagtatagtgtttttagttgagttttttagtggaaattcgtattaatagggatttttagggtagtttgagaagtttaagttgtttgtttaggttatggttattaatgatatatgtgtattaagtgttttttaatgtagggaatttaatttttaagagattgtagttgttggttttaatgttttatttttatgtttttttttttttttttttttgagacggagtttcgttgttttgtttaggtt

SEQ ID NO: 39 - DNA, 8085 bp, Artificial Sequence
  chemically treated genomic DNA (Homo sapiens)
  unsure (2545)
gttttatgatttaattattttttaatatttttttttattaagattattatattggtgattgggttttgatatatagatttggggagaatataaatatttatattatagtatttattaatttatttagttattttattgttaggtatttatttagaaaaaatgaaaatatatgtttatataaagatttgtataatatttttatagtagttttatttataatattaaaaaaattggaaataatttagatatttatttatagttaaatggataaataaattatagtatataaataaaaagaataaaaagaattaattattgatatatattataatttagttgaattttaaaataattatgttgagtgagagaaattaaatgaaaaaaagatatattatattatatataattttaagaaataaaatttaatttatttggtatttagatttttatttttatattagttttaaataaaaagttttaaatttttttggataaatggttgattttacgattggggtaggaaatatataagatgagtttgatgagtttgtagtattttgtaatattagaaagtaggaaagtttatatatatatatatatatatataatatagagagtgggttaaggagtataagagttaattgaaaaagtttttagtgttaaaaattggaaaaatttgagtaataaagtatttatgaatttatataaagaaaagattgaataaagaagtaaatgggggagaagaagtaaattttttttatagaattttaaataaattatgtagatattttattttaaaggagggttagtataattttttatttttttatatttttttaagtgatttataatgatttttttttaaagagtatagagtatgtaaagagggaaaaaagagtaattatgtaatggagaaatttgataaatattattttagttaggtgatggagaataatattaatagttataagttatgttgataatatgtattttttatatgatgtaataaatatagtatattatttttttgatttttatttcgttaaaatttaaaattttagtttatttatgaggatatattaaattttaatagaagggtattttgtaatatattttattagtatttttaaggattgttaaggttattaaatataaggaaaatttgagaaatttttatagttaagaggagtataagatattataataattaaatgtggtgttttggatggaattttggaaaggaaaaaggatattaagtgaaaatgaagaaaatttaaataaattatgaatattagttaataataatttattagtattagtttattaattgtaataaatgtattttattaatttaaaatgttaatagagaaaattgtataaatgatatatgagtattttttatattatttgtttaatttttttgtaaatttaaaatcgttttttaaaagtaaaatttattaataaaatatttaaagtaaatagatttaaaaggtatatgtaaatgtataatttaatgtttaataaattagatataaatatttttaaaaatttaatatttggtgatagaaagtagattagtggtttgttagaaagtggtgattagtattaggggaaggggatgggatagaatagtatgaagggatttaaaaaatggtatgaggaaatttttggaggtaaagggtatgtttattattttagttttataggtttaataataaattatataatttaaatatatgtagtttattatatgataattatattttgataaagtggtttttttttttaaattatagaaaaaatatttttatatttaaatttttttttttaaaaatagtttttaggaatatttgaagttagttttattatatttgaatttaattagtgaattttgtttatttaaagatttatatatttgggaagtttttgtgttaaaaatgttaattatttagtattaaaatttatggaataatggtgatttaggatatgttggatatttttattgttgtttttttattttaagatttttaattttttggaaataatttttttagatattttgataagggaattattataattaattaaaattaagttaaatatagtttgttagatttaaaatgaggttaagtgttaattttatagtagcgatcggaaaattaaattatatggtatttgatatttaaaattatatttttaagaaggttgttatttgatgttttgggtttgggttatagtatttaattttataatattgggtaattttgtgttttagtttttttaattatgaaattgggataatagtatttattttgtgagattgttgaaggattatagttaatataggtaaaaggtttataagattatttggtaatgttgttttgattttataaattttatatattgtgtggtattagttattaggaaaatataaataaattagtgagatattattttatatatttggggggttataataaaaaagatagataaaaaatgttgttaaagatgtgaagaaattaggatttttatttattgttggtgnaaatgtaagaagtataattatttgaattatagtttggtagttattttaaagattatatttagagttgttatatgaattagtaattttatttttatgtatatatttaggagaaaggaaaatatacgttgtataaaaatttgtatatgaatgtttattagtaggattttttatggtagttaaaaggtgtaaataatttaaatgtttaataattgatagagatggataaataaaatgtggtttatttatataatgaaatattatttgttaataaaaaggagtgaaggagtgaagtattgatttatgtggaatatggatgaattttgatttaaaatagttaaattataggtataaaaagtatattagtggttgttgggagatttaggcggaaatgtggaataattgttagtgggtattgagattttagagttatatttatgttataaaattaatagtgttgatggttgtataattttgagtatatgaaaaattaatgaattgatattttgagtgagttgtatgatattggaattatattttaataaagtatggtaattgttttaagataggttggaaagagaaagtttgaaaataataataatgatattaataaattagtttatttttttagttttatatatttttgtgtttatatttgtttttgttttatttataatggtttttttgtagttgttatattatattttgttatttgatgttcggtgaatattttatatttgttttttagaattttttttattttttttttatttgtttaatttttatatatttaaaattaattagagtaaattatttattagaataattaattttaaattttagtaatttaatatgataaaggtttgttttttatttatatagtttttttttagatgatcgaggggtttaggttttttatttttagtggtttttttattttttggagttttttgtattttttatatatggttgagataaattatgagttattagtatagttagattttgaggttttataagaaaatttgtaaattatttattttgttttgaataaggtatatttaagatgatgttaaaatatttaatggttttgggttaaatatagtttatgattgtgtatttaaaatatatattgtaatatttttttttttttttattgattttatgaatttagcggggatttattttataagtttaaagataattattttttagattaagaatatttagggtaaaaagtattgtttaatatttttattgaggatgttatgatgtagtatattgtataagttggagttaaaggaaattttttttaaagtgttatttattaaaaattggaatatattttttaagataaatcgaagtgtggtatataatatttaaatttttattatagatatagaggtgttattattttttatttttaaatttttttgttacgttgaggatatttaagaggagtaggatatgttggtcgtagtaggagaaatttgaaagtatttatttttatggaatttataagggagagaattttttattttagtatcgtttttgatatatttattattttaaaagataatgtagttaaatgtttttttttgtgttaaatttttataaaattgaaattttaaaatggtgataaaaattttatttttgatagaatttatttatttttttaattagatagggtataatttttaatttgtaaaataaaacgtaatatgtttatgaggttttattttaaagaatttgttattgagagtagtatttagaataacgggtggaaatgttaattttagagttttagattttatcggtaattggggtagggaggggttttgggcggggtttttttagaggaggaggcgttgttagaaagttgtttggttagtttatagttgttattaatcggggtaagttttgttgtatttgtgcgtgtgggtggtatttttaatgagaattagttttatttgttatttgagtgaaatttataattcgaggcggttagtgttttcgtattattgggatttgagattttcggagatgattgtcgttcgtagtacggagttagtagaagttcgattttttttgggaatgggttgtatcgagaggttcgattagttttagggttttagtgagggggtagtggaatttagcgagggattgagagttttatagtatgtacgagtttgatgttagagaaaaagtcgggagataaaggagtcgcgtgttattaaattgtcgtcgtagtcgtagttatttaagtgtcggatttgtgagtattttgcgtttttagttttcggatagaagttggagaatttttttggagaatttttcgagttaggagacgagattttttaataattattatttttttttgcgttttttatttgtcgttcgttgggataaacgatagttatagtttttttgacgataggatggaggttaagggtaggagttgattagcgtcgttttttttcgttttcgatttaggaggtggagattttttcggtttagttatatttaatatttatttttttttttttttgtttttatattttcgaaatttttttttttttttttttttttttttttttggagacgggggaggagaaaaggggagtttagtcgttatgattgagttgaaggtaaagggttttcgggttttttacgtggcgggcggttcgttttttttcgaggtcggatttttattgttgtgtcgtttagtcgtaggttcgttttcggggagttagatttcggatattttgtttgaagtttcggttatatttatttttttggacgggttatttttttttcggttttgttagggataggattttttcgacgaaaagacgtaggattagtagtcgttgtcggacgtggagggcgtatattttagagttgaagttataaggggtgttggaggtagtagttttagttttttagaaaaggatagcggattgttggatagtgttttggatattttgttggcgtttttaggtttcgggtagagttaatttagttttttcgtttgcgaggttattagtttttggtgtttgtttggtttcgaatttttcgaagatttatcggttgttttcgttatttagcgggtgttgttttcgtttatgagtcggttcgggtgtaaggttggagatagtttcgggacggtagttgtttataaagtgttgtttcggggtttgttattagttcggtagttgttgttttcggtttttgagagtttttattggttcggggttttagtgaagtcgttttcgtaggtcgttgcggtggaggttgaggaggaggatggttttgagttcgaggagtttgcgggttcgtttttgaagggtaaatttcgggttttgggtggcgcggcggttggaggaggagtcgcggttgtttcgtcggggcggtagtaggaggcgtcgttttggtttttaaggaagattttcgttttttagcgtttagggtcgttttggtggagtaggacgcgtcgatcgttcgggacgttttcgttggttattacggtgatggattttatttacgtgtttattttgttttttaattacgttttattggtagttcgtattcggtagttgttggaagacgaaagttacgacggcggggtcggggttgttagcgtttttgtttcgtcgcggagtttattttgtgtttcgtttatttcggtcgttgtaggcgattttttcgattgcgcgtattcgttcgacgtcgagtttaaggacgacgcgtattttttttatagcgatttttagtcgttcgttttaaagataaaggaggaggaggaaggcgcggaggttttcgcgcgtttttcgcgtttttattttgtggtcggtgttaatttcgtagttttttcggatttttcgttggggttatcgttttcgttgtcgtcgcgagcgattttatttagattcggggaagcggcggtgacggtcgtattcgttagtgttttagtttcgtttgcgtttttttcggggtcgattttggagtgtattttgtataaagcggagggcgcgtcgttttagtagggttcgttcgcgtcgtcgttttgtaaggcgtcgggcgcgagcggttgtttgttttcgcgggacggtttgttttttattttcgtttttgtcgtcgtcgtcggggcggttttcgcgttttattttgtattcggttttaacgggttttcgtagttcggttattaggtcgtcgtgtttaaggagggtttgtcgtaggtttattcgttttattttaattatttgaggtgagggttcgggacggggtacgtttagcgcgttcgggagtagcggtttcgttggcggcggcggtcgttaatttttagttttagttttagcgtatcgttgcgtttttcggggcggtcggagagggtgggtagcgggatatagtataggggtagttgtttttttttttttttttttttttttttatttttggggatacgaaggtgggcgtagaatatattatttttggggcgtgtttttttgaaagttgtttttttgtttgttttttaatttttcgaattttttagatttcgaagtagaattaatttcgatttaaaacgtgtagcgttatattaggttcgttgtagtttagtggggtagaaagtgcgcggcgagttgggggttttatgaaatgttttttttttagaagaaggacgtttattaggagtgtttgttttggagaggagttaaggtatcgttttttcgggaggggtgggatttgagaggtggtcggttagaatcgaaagtagtattattttagggatttgaatattttagtggtttagtttttttaagaattttaagattaaaattaagtttacgtgggaaatgtttaaattgtggatttaaacgtttgttattgtattgtatcgtttttttattattgtttgttatttattataattttttttatatataggtttaaaaaatattattttgtatattgaagtaatggaatgtaaaaaaagaatgttttgtttggaattttatgttgtgaataggtaaaatagtgttagtgtattggataatattttaaaatgataaatatatatttgtttaagtaagtaatgattatagggttgtgttttaaaaatttaaaattaaaatattgtaaagtattatcgaatttttaaagttaaattatatttgttttgatttagtatatagataggaaggatataatattttatttgttaaagattaaattgtttttatataaagagttttgtagaaagatttttttttaatcgattttaattttttaggatataatattatatattaattattgtttttttatattggtgttattgatgaatggttaattatttgtaagtatggtgaatttagttacggatagtttattattaagtttagtttgtatgttttttaagtgtatatatatagttttgtttttaaaatttttttttattttgttaatattggtttaagaaatttttagtattagatagtggtgtatttaaaaataaatggagtattttgttttgtattttaagg

SEQ ID NO: 40 - DNA, 8085 bp, Artificial Sequence
  chemically treated genomic DNA (Homo sapiens)
  unsure (5541)
ttttgaaatgtaaaataaagtattttatttatttttaagtgtattattatttaatattaaaggttttttaaattagtattaatagggtgaaaggagattttaaaaatagaattgtatatatatatttgaaagatatgtaaattaaatttggtaatagattattcgtaattggatttattatatttgtaaatgattagttatttattagtagtattaatataaaagaataataattagtgtataatattatgttttagaaagttaaagtcggttaaaaggaaatttttttataaaattttttatatagaaataatttagtttttgataaatgaaatgttatgttttttttgtttgtatgttgggttaaaataaatatggtttggttttaaaagttcgatggtattttgtaatgttttggttttgagtttttaaaatataattttgtaattattgtttatttaagtaagtatatgtttgttattttaaagtattgtttaatatattgatattgttttgtttatttataatataagattttaaatagagtattttttttttatattttattattttagtatgtaaagtagtgttttttaaatttgtatataaaaaaaattgtagtgaatagtaagtaataataagaaaacggtgtaatgtagtgataggcgtttaaatttatagtttaaatattttttacgtgaatttaattttaattttgagatttttaagaaaattgagttattgaagtgtttaaatttttaagatggtgttgttttcggttttggtcggttattttttaagttttatttttttcgggggaacggtgttttaatttttttttaagataagtatttttggtaaacgttttttttttaagaaagaagtattttataaagtttttaattcgtcgcgtattttttgttttattgggttatagcggatttagtgtgacgttgtacgttttaaatcggggttggttttgtttcggaatttggaagattcggaaagttaaaaaataaataaaaaaatagtttttagggaggtacgttttaaaaatagtatattttgcgtttattttcgtgtttttaagagtgaggagaggagggaagaagaagggaggtaattgtttttgtgttgtgtttcgttgtttatttttttcggtcgtttcggggagcgtagcggtgcgttggggttggggttgagggttggcggtcgtcgtcgttaacggaatcgttattttcggacgcgttgggcgtgtttcgtttcgggtttttattttaggtagttgagatagggcgggtagatttgcggtaggttttttttgagtacggcggtttggtagtcgagttgcgggagttcgttgaggtcgagtgtagggtagagcgcgggggtcgtttcggcggcggcggtagaggcggaggtggagggtaggtcgtttcgcgggagtaggtagtcgttcgcgttcggcgttttgtagggcggcggcgcgaacgggttttgttggggcggcgcgtttttcgttttgtataggatgtattttagggtcgatttcgaggaggacgtagacgagattgaggtattggcgggtgcggtcgttatcgtcgttttttcgggtttggatggggtcgttcgcggcggtagcgggggcggtggttttaacgggaaattcgggaaggttgcggggttggtatcggttataaggtaggaacgcggggagcgcgcggaggttttcgcgttttttttttttttttttatttttagagcgggcggttggaagtcgttatagagagggtacgcgtcgtttttgggttcggcgtcgggcgggtacgcgtagtcggggaagtcgtttatagcgatcggggtggacgaggtatagggtgaatttcgcggcggggtaaaggcgttggtagtttcggtttcgtcgtcgtaattttcgttttttagtagttgtcgagtgcgggttgttaataaggcgtgattgagaggtaggataggtacgtggatgaaatttattatcgtggtggttagcggggacgtttcggacgatcggcgcgttttgttttattagggcgattttgggcgttgagaagcgggaattttttttggggattagggcgacgttttttgttgtcgtttcggcgggatagtcgcggttttttttttagtcgtcgcgttatttagagttcgaggtttgttttttagaagcggattcgtagatttttcggatttagagttatttttttttttaatttttatcgtagcggtttgcggagacggttttattggggtttcggattagtgagggtttttagaggtcgggagtagtagttgtcgggttggtgataggtttcggggtagtattttatgggtagttgtcgtttcggagttgtttttaattttgtattcggatcggtttatgagcggggataatattcgttgggtggcgggggtagtcggtggattttcgggaagttcggggttaaataggtattaagagttggtgatttcgtaggcgggagggttgggttggttttgttcgggatttgagggcgttaatagagtgtttaagatattgtttagtagttcgttgtttttttttgggggattagaattgttgtttttagtattttttgtagttttagttttggaatatgcgttttttacgttcgatagcgattgttggttttgcgttttttcgtcggaggggttttgtttttggtagggtcgagggaagagtagttcgtttagggagataggtatggtcgaaattttaggtaaggtgttcgaggtttggtttttcgggaacggatttgcggttgggcgatatagtagtggggattcgatttcgggggagggcgggtcgttcgttacgtggggagttcggggattttttgtttttagtttagttatgacgattggatttttttttttttttttttcgtttttagggaggagggaaaagggaaggaggagggggtttcgggaatataggggtagagggaggagaaagtgggtgttgaatgtggttggatcggagggatttttattttttgggtcgggggcgggggagggcggcgttggttagtttttgtttttggtttttattttgtcgttaggggaattgtggttgtcgtttgttttagcgagcggtaagtggggagcgtaagaaaaagtagtaattgttaggagatttcgttttttaattcggggagttttttaagagagttttttaatttttgttcgaggattggagacgtagagtatttataagttcggtatttgagtggttgcggttgcgacggtaatttagtgatacgcggtttttttatttttcgattttttttttggtattaaattcgtgtatgttgtgaagtttttagtttttcgttgagttttattgtttttttattaaaattttggggttagtcggatttttcggtatagtttatttttaggaagggtcggatttttgttggtttcgtattgcgggcgatagttattttcgaagattttagattttagtagtgcgggagtattagtcgtttcgggttgtagattttatttaaatgataagtgaagttagtttttattgagaatgttatttatacgtataaatataataaggtttatttcgattagtgatagttgtggattggttagatagttttttaataacgtttttttttttagggaggtttcgtttaaagtttttttttattttaattatcggtaggatttgaaattttggagttggtatttttattcgttattttgaatgttatttttaatagtaggttttttgggatggaattttataagtatattacgttttgttttgtaaattaagaattatgttttatttaattggaaaaatgaatagattttattagaagtagaatttttgttattattttaagattttagttttgtaaagatttaatatagaggaagatatttggttatattattttttaaaataataaatgtattaaggacgatattaaaataagaaatttttttttttatgagttttataaaagtgaatgtttttaagttttttttgttgcgattaatatgttttgttttttttgagtatttttagcgtgataaagaaatttgggagtgggagatggtaatatttttgtatttatgatggaagtttggatgttgtgtgttatatttcgatttgttttaaggaatgtgttttaatttttagtaaatagtattttaaggaaagttttttttagttttagtttatatagtgtgttatattataatatttttagtagagatgttgaatagtattttttattttaaatatttttagtttgaaaagtaattatttttgagtttataaaatggattttcgttaaatttatgaagttagtagaaaaagggaagaatattgtaatatatattttagatatatagttataaattgtatttgatttaagattattgggtattttaatattattttaaatatattttgtttaaaatagagtgaatgatttgtaaatttttttgtaggattttaaggtttagttgtgttaatgatttatagtttattttaattatgtataaagaatgtagaagattttagaaggtgggggagttattagaggtaaggagtttggatttttcgattatttggggaggggttatatgagtgagaaataaatttttattatgttaggttattaggatttggagttggttgttttagtaaatagtttattttgattaattttagatatgtggaagttaggtagatagaggaaaggtaaagagaattttgggaagtaggtatagaatgtttatcgggtattaaatggtaggatataatatggtaattgtaaggggattattatgaatagaataggagtaagtgtgggtatagaagtatatgagattagagaagtaaattaatttattaatattattattgttgtttttaggttttttttttttagtttattttaaaatagttattatgttttattgaggtgtaattttagtattatatagtttatttaaagtattagtttattgattttttatgtatttagagttgtgtaattattagtattattaattttgtaatatgagtatgattttaaaattttaatatttattagtagttattttatattttcgtttaaattttttagtagttattaatatgttttttgtatttgtgatttggttattttggattaaggtttatttatgttttatatgaattagtattttatttttttatttttttttattgataaataatattttattgtatggataaattatattttatttatttatttttattagttgttggatatttgggttgtttatattttttggttattatgaaaaattttgttaatgaatatttatgtataagtttttgtgtagcgtatattttttttttttttggatatatgtataggagtggaattgttggtttatatggtaattttaggtgtggtttttggagtaattgttagattatggtttaaatgattgtattttttatatttntattagtagtgaataagggttttagtttttttatatttttgataatattttttatttgttttttttgttatagttttttaagtgtgtgaagtggtattttattgatttatttatatttttttgatggttaatgttatatagtgtatagaatttgtaaaattaggatagtattgttaggtagttttgtaagttttttatttgtgttaattgtaattttttaatagttttataaaataggtattgttattttaattttatagttgggaaaattgaggtataaggttatttagtattataaagttaagtattgtaatttaaatttaagatattaaatgatagtttttttaggagtgtgattttaaatgttagatgttatataatttgatttttcggtcgttgttgtaaaattggtatttggttttattttaaatttgataaattatatttggtttgattttggttggttataataatttttttgttagaatgtttggggaggttgtttttaaaagattgaaaattttgaagtgggaaaataataataaagatgtttagtatgttttaaattattattattttataaattttgatgttgggtgattagtatttttggtataggaattttttaaatgtatgaatttttgaatgaataaaatttattgattaaatttaggtgtgatggggttaattttaaatatttttgaagattgtttttggagaagaggatttaaatgtggaagtattttttttatagtttggggaaaaaaattattttattaagatatagttgttatataataagttgtatatatttaaattgtataatttgttgttagatttgtgaaattaaaatgataaatatattttttgtttttaaaagtttttttatgttattttttaaatttttttatattgttttgttttattttttttttttagtattaattattattttttggtaagttattaatttgttttttgttattaaatattaggtttttaaaaatatttatatttgatttattaaatattaaattatatatttgtatatgttttttaggtttgtttgttttagatgttttattaatagattttatttttgggaaacgattttggatttatagaaaaattgagtagataatatagagaatgtttatatattatttgtataattttttttgttagtattttaaattaatagggtatatttgttataattaatgaattaatattgataaattgttattaattaatatttatagtttatttagattttttttatttttatttaatgtttttttttttttttaggattttatttaggatattatatttaattgttatgatgttttgtgttttttttggttgtgagagttttttagattttttttgtatttgatgattttgatagtttttaggagtattggtgaggtatattgtaagatgtttttttattgggatttgatgtatttttatgagtagattagggttttgggttttggcggggtggaaattaaagaggtaatgtattgtatttattatattatatgaagggtatatattgttaatatgatttatgattgttaatgttgttttttattatttggttgaagtagtgtttgttaggtttttttattgtatagttatttttttttttttttttgtatattttgtattttttggaaggaaattattatgagttatttaaggaagtgtgggggagtagggagttatgttagtttttttttggagtggagtatttatataatttatttggaattttgtgaggaagatttgtttttttttttttatttatttttttatttagttttttttttgtatggatttatgaatattttgttgtttaaatttttttagtttttggtattgggggtttttttagttgatttttgtgttttttgatttattttttgtattgtgtgtatgtgtgtgtatgtgtggatttttttattttttggtattataagatgttatagatttattagatttattttgtatattttttgttttagtcgtagaattagttatttatttaaggaagtttgagattttttatttgaaattggtatagaaatgaagatttgggtgttaaataaattaggttttattttttagaattgtatataatatagtgtattttttttttatttggttttttttatttagtataattattttgagatttagttaaattatagtatgtattaatagttaattttttttattttttttatttatatattatagtttgtttatttatttaattgtggataaatatttgagttgtttttaatttttttggtattataaatagagttattatgaaaatgttgtataagtttttgtatgaatatgtgtttttattttttttgggtaaatatttagtagtgaaatggttggataaattagtaggtgttgtgatatgagtgtttgtgttttttttaaatttgtgtgttaaaatttaattattaatgtgatagttttagtaggaggaggtgttggggagtgattaggttatggagt

SEQ ID NO: 41 - DNA, 5118 bp, Artificial Sequence
  chemically treated genomic DNA (Homo sapiens)
aagtgtaggatggtttgtttttgaaatatatttggtttaaatgtttattatgggagagagaaatagataggagttgaagaaaggagcggggttttgttgttttttgtttatggagtacgtagggcgggcggatgaaggtcggagttagtcgaggttgggattgagtattaagattggtttgggatggatttgatttttggttaatagaggagataaggggtcggttgggagtgtgatttagaaagaggtagaggagcgtgtgaagatggggttaaagtatttggaaggttggttggggaatgaggcgatagaaattattaataggggaggtggcgtttatagggatggtttattgtttttgagatggaggttttggggtttttggggtggatatagttgtggacgttttttggaagagttaggggtagtagtgataaagatataattagagggtttttaattagtattttttttaaaagatgttttttttttttttttagatttattttagttagtttatattttggtggtaaggtttttttttgtttttattatatagaattattaatttttaatattaggttttttaagttgtttgttcgggttaggggagtattgtagggagaggttgaaatagtgttttttttgggattttttggttgttttattgttttatttttattttcgttatttttatttaaatttagaggttttaatagatagttaaggtttagtagtttaggagttggagttggataatttgaggagtaagttaataaggttaattttgttatgtttatttttgttttttaggagaaggatatgattttttttatattttatttaaaaattaaaattaattttttggtgtaaagtttatgttttttttgaaattaggtggaatagtaagaagatttgtaggatagggatatggaattaggttattgtatattggtgaataaattgtgtatattatataaatttaaaagatattatttataggatagatgttgtagatagggatgtttgttatgatatttttttaatagatgatagtaaaggttgttgtagaaattttttagtagatgatagtaaaggttgttatggatagaatatttttttttaatttttttaaaaatatgggagggttagtagtagtttagtgatagtttgggttttttttttttaaggtttagatttagagttttattttattttttttaaagtttattttttttttagttttttttcgtgtgtttagatttgttatggtgggtttatttattttttttgggaagagataggatagatagggatttatgggatgagggtaatacgagataggtggggaatttttttttggagattaaagatatttttttttattattttatttttataagagttatttggttagaagggatatcgagttggatttttttataaggattgggaggttggttttggaggtcggcgaagagataaggaggttgtagtcgagagatttgtgttttttagtaagatttaaggtaagagattagagttttaatgaggttgagtttgtttttgattatttttttttttttttaattgttttttatgatttttgattttttatttttttgtaatttagtatttggtttgtggttgggtgtttttgggtttgtaggtcggatgggattggggtttttaggatagttaaaagagattagggattcgtttttttttgttattttttggagagaaaaatagtaatttttgggttttttttttttttttgttttagttttttttaggaatttattattttagtttaagtttttttagattttttatcgggttgagtgttttatattatgtagaggtagttaggttggggatgatagaaataattgttttgttttttgttgtagatttggggtataaggagggaggttatggggaagttgaaataagggtaagatgagaggtattaggtaaggaaagaggataaaatgtagataaaagagatgatgggatttgtgtttagattagaaatggtagatgtgttaaatagattaggataattaggtttggttaaaaattatttgttattgaattatttggggtagattttggattttagaaatatggaggttggatttaggaatgtgtatttttaaaaagttttttggttaattatgaagtatattgaaattggagatttattgattttagaaaaaggggttttagatttaaggatgaaaggttggaggtttaaagtttattattttagttattaagtgttttggtgtttggatatagaagggagttttacggagaaatgttatatttgaaagagtagtttttaaagtaaaaatatttttagttttttttgttttgtttttatacgtattgtaggtatattgggttgtaatttgtttagtatttttttaggttgggatggataggagtataggtatagatgaataaggttaagttagattttattgtgaggagggtgaaggaggtttggatttaatgcgggttaaaggttagggttaaaagttatttacgttattttttggagttttaggtaagtttagtagtttttagtgtttcgtgtattcgagttttacggttcgaaggggtaggtttaggggatttggagggggtagtattacggggaaaggttaaaagttaggggttaaagtttattttatatcggttatttcgttttatttttttttttttttttttattaagtcgttttgtttttattattttggagttatagtagttgtttggtagttcggaagtgcggtaagtagtcgttgcgaagtaagtttcgtttcggaacgggcggaagtagaggtaattttcggtatagtttcgtcgagagcgtgaattatcgttgcggaggggtagatttggatcggtggaaggtcgggcggaagtgcgcgtttggggtcgttttggttatcgcgtttttcgtttttcgttacgttatcgttgtgagttcgttattagcggttagcgcgggcgcggtcggagatcgtggggttttcggttgtcgttttttcgggtaaggttttttgttttttatttttcggtttttttttttatagtcgtttttttgttttttttttttgcgttgttttgcgggcgttacgttggttttatcgttttttttgtcgtttaaatttcgcggttgtttttattttagcgagggtaggggggtcgggtgttatcgttttttcgacggagtggatatttgtttttttttgaattatatggtatttaaaggtgttggtgtttgtgatttttggagataggagggaatgttggatgatttcgattagcgggagtttggatagtagtttggtttaagtaaggggtagggaaagttaaagataagagtaggtagatttgaaggggtggggttgggtatagtgtggacggcgtgtgaatttcgggtggtaatagtggagaaagatgttttgggttttgtttttgaattaggagttattatgttggtgatatttttcggattgagcgaggaagaggaggttttgtagaagaaatttaataagtttaagaaaaaggtgagggattgtgtgtggatatggtttaattttttatagattttgtattttgagaagatatggggtgagtgtgagcgaatggggaagtttttttggtttatatttagagatatattattttatagtgtagtttcgagaggtgggtttttttaagttttggtgtggattttttgttttttttatgtaatttgttatggattgttttttttttttatggtttttagtatcgtttaagagttgatgatttttaagtttgttttttttagttttatttagtgttatattgaaaaattttagatatttagtgttgaagttattatttttttatttttgattttttaaataagattgattatattaattttgttatatgtttggatttaaaattttgatttttttattatttgtatagttaaatttttgttaagttttattgtttttttttttgaagtaattttttttgtttattttttattgtgtattttttcgagtagggttttattgatatttatgtgggttattgtaatggttttttaataaattttttagtttttttttttgaatagatttttttatttttgtttaaatgatttattgaaaatataaaattttgttttttttgttttttaaaaattataaatggttttatattgtttataaaaaagttttaaaattttagtttggtagttttgtttagtaaagtagaattatttattatttttaaaagatgtatttttaaagtttttttatttttgtatttttgttattttgttttttttttttaaaatattttttttttttttgtgttgtgtagagatacgggagagggtttagtttaatagttattaaatattagaaaattttattagtttttagttatgaataatttgtattttttataattgtattgttaatttaatgtattttattttttagattgtaagttttttgagggtaggaataatgtattagttttttggatatttttgttacgaagttatggttgggttttatttaatatgtaggaaatagatggatgaagtttttaggaaaggtatataaatttatatttatttgtagtttatattttaggattttagtttatgattgagttatttgtttttaattttaaaaatgtaatattttggaaaatttttgggtttcgtggtttggttagattaggaatttttagtattatatatgatttaggggattagaggtaagaggtagagtatattagtgtattattttgagggtattaagaaagatggtttttggagtgatgtgtttaggggttttaggagaggaatcggttaggggttggtttttatttatttttttttttttatttttgtttttagaaaaaggtattgttggttttgaagaagtaaagtagtagtagtataattagttaaggtggtgttaaacgttgtgagtgataggggaaatggggatggattggaagtgggtagtatggagttgatttttattatggtttggttaatataatgttttttttttttgtttttttagt

SEQ ID NO: 42 - DNA, 5118 bp, Artificial Sequence
  chemically treated genomic DNA (Homo sapiens)
gttggagagataaggggaagaggtattatgttggttaagttatgatgaaggttagttttatgttgtttatttttagtttatttttattttttttgttatttatagcgtttgatattattttggttggttgtgttgttgttattttgtttttttagagttagtaatgtttttttttgggaataagggtgagaagagagaggtaagtgagggttagtttttagtcggttttttttttaaggtttttgggtatattattttagggattattttttttgatgtttttagagtggtatattgatgtgttttgttttttgtttttggttttttagattatgtatgatgttggaaatttttaatttaattaaattacggaatttagaggttttttagagtgttatatttttgaagttgaagataaataatttaattatggattagaattttaggatataagttgtaagtaagtataagtttatgtgttttttttggaagttttatttatttattttttgtatattgaatgaggtttagttatgatttcgtaatagggatatttaggaggttaatgtattgtttttatttttaagaagtttatagtttgagaaataaaatatattgagttagtaatataattataagaggtgtagattatttatagttgaaagttagtaagattttttgatgtttaatggttattaaattaggttttttttcgtatttttgtataatatagagaggagaagggtattttagaaaaagaaaatagggtggtaaagatgtagagataagaaggttttgggaatgtattttttggaagtagtgaatagttttattttattagataaggttgttaaattaaggttttgaggtttttttatagataatgtgaagttatttatggtttttgagaaatagagggagtagaattttgtgtttttaatggattatttgaataggagtgaagaagtttgtttaaaaaaaaagattgagaaatttgttgagagattattataatggtttatatgaatgttaataaagttttgttcgggggaatgtatagtgaagaataaataggaaaaattattttaaaagaagaaataataagatttggtaaaggtttgattatgtaaatagtggggaagttagagttttgagtttaaatatgtggtagaattggtgtagttaattttatttggaagattaagaatagaaagatgatagttttaatattgagtatttgaagttttttagtataatattggatagaattggaaaaaataaatttggggattattagtttttaagcggtattaaaagttatgggaaaggaagataatttatggtaaattgtatagaaaagatagaaggtttatattaaggtttgggaaagtttatttttcgaagttatattgtgaggtgatatgtttttaggtatgggttagaaaaatttttttattcgtttatatttattttatatttttttagagtgtagagtttgtgaaaggttaggttatgtttatatatagttttttattttttttttgagtttgttgaattttttttgtagagttttttttttttcgtttagttcggggggtattattaatatggtggtttttagtttaggggtagggtttaagatatttttttttattgttattattcggggtttatacgtcgtttatattgtatttaattttatttttttaggtttgtttatttttgtttttggttttttttattttttgtttaaattaggttgttgtttaagttttcgttggtcgggattatttagtatttttttttgtttttagggattatagatattagtatttttaggtattatgtggtttaaggagggataaatatttatttcgtcggaaagacgatggtattcgatttttttattttcgttagggtaaggataatcgcggggtttgaacggtagagaaggcggtggagttagcgtagcgttcgtagagtaacgtaaagaggaagaatagagaaacggttatgagaaaaagggtcgaagagtgagaagtagagggttttattcgagggggcggtaatcgggggttttacggttttcggtcgcgttcgcgttggtcgttgatagcgggtttataacgatgacgtagcgaggagcggaaaacgcggtaattaaggcggttttaggcgcgtattttcgttcggttttttatcggtttaggtttgttttttcgtagcgatagtttacgttttcggcggggttgtatcggaagttgtttttattttcgttcgtttcggggcggggtttatttcgtagcgattatttgtcgtattttcgggttgttaggtagttgttgtggttttaggatgatggagatagagcgatttggtgagggggaggggagggaaatggaacggagtagtcgatatggaatgaattttgatttttgatttttgattttttttcgtagtgttattttttttagattttttggatttattttttcgggtcgtggagttcggatgtacggggtattgggagttgttgaatttgtttggagttttagagagtagcgtgagtgatttttgattttaatttttgattcgtattgagtttaaattttttttattttttttatagtaggatttagtttaattttgtttatttgtgtttgtatttttgtttattttagtttgaaggggtgttggatagattatagtttagtgtatttgtagtacgtgtgaggatagagtagaaagggttggggatatttttgttttgagagttgtttttttaaatgtggtattttttcgtggagtttttttttgtatttaagtattagggtatttggtgattgagatgataggttttgagtttttaattttttatttttaggtttgggatttttttttttaaaattagtgagtttttaattttagtgtgttttatgattagttagggagttttttaaaaatgtatatttttaggtttagtttttatgtttttgaaatttaaaatttgttttaggtaatttagtagtaggtagtttttggttaagtttgattgttttagtttgtttgatatatttgttatttttgatttgaatataagttttattattttttttgtttgtattttattttttttttttatttaatgttttttattttgtttttgttttagtttttttatggtttttttttttgtgttttagatttgtagtaagaagtagaatagttgtttttgttatttttagtttggttgtttttgtatggtgtggagtatttagttcggtgaggagtttggaggggtttagattagggtgatgggtttttgaaggaagttgggatagaggaagaaagaagatttaaaagttattatttttttttttagaaaatggtagaggaagacggatttttggttttttttggttgttttgggagttttagttttattcgatttataggtttaaagatatttaattataggttagatattgggttataaagaggtaggaggttaggggttatgagaaatagttggggagaaggggaggtggttagagataagtttagttttattggggttttgattttttgttttaggttttgttggagaatataaatttttcggttataatttttttgttttttcgtcggtttttagggttagttttttagtttttatggggaaatttaattcggtattttttttggttaggtgatttttgtggagatgggatggtagaagagggtgtttttaatttttagggaagggttttttatttatttcgtattatttttattttatgaatttttgtttgttttgtttttttttaggggggatggatgaatttattataatagatttgaatatacgggaggaggttgaggaggagatagattttgagaaaggtaaggtggggttttgagtttgagttttgaggaggaagagtttaggttattattgggttattgttagtttttttatgtttttgagaaaattagaaaaagatattttgtttataataatttttattgttatttgttgggaaatttttataataatttttattgttatttgttgggaaagtgttatagtaaatatttttatttatagtatttgttttgtaaatggtattttttaggtttatataatgtatataatttgtttattagtgtgtagtgatttgattttatgtttttattttatagatttttttattattttatttggttttaagaaaggtatggattttgtattaaaaggttagttttagtttttgagtggggtgtaggagaagttatgttttttttttaaggaatagagatggatatgataaggttgattttgttggtttgttttttagattgtttaattttagtttttggattattaagttttagttgtttgttggagtttttggatttgggtgggggtgacgaggatgagaatgaggtagtgggatagttaggaggttttagaggggatattgttttagtttttttttgtagtgtttttttggttcgagtaagtagtttggaagatttagtgttgaaggttggtggttttgtgtagtggaggtaagaaagagttttgttattaggatgtgggttggttaggatgggtttgaggggaagaaagggatattttttgggaggagtgttaattgagagttttttggttgtatttttattattgttatttttgatttttttaggaagcgtttatagttgtatttattttagaggttttagagtttttattttaggagtagtgggttatttttgtggacgttattttttttgttggtgatttttatcgttttattttttagttagttttttaggtattttggttttatttttatacgtttttttatttttttttgggttatatttttagtcgattttttgttttttttattggttagaggttagatttattttaggttagttttggtatttagttttagtttcggttggtttcggtttttattcgttcgttttgcgtgttttatgagtaggaggtagtaaggtttcgtttttttttttagtttttgtttattttttttttttatagtgggtatttgagttagatgtgttttagaaataggttattttgtattt

SEQ ID NO: 43 - DNA, 6074 bp, Artificial Sequence
  chemically treated genomic DNA (Homo sapiens)
ttttagttttttatagttttttgatttttttttttttgattttttatatttttttttttttattttttttttgtttttgttaattattattattttatttttattaatattattaagtgtatttgtttgagtatttttgggtgtttgatttaggatttttttaggggtatttttgttggggtaatttttttagtttttagaagggtatggttgtgtggttgagattgttgaggaaagtagtaaagataggaggatagaattgaatgtaaagttattttgtttttaagtacgtttaatggaatggttttatagtagttgcgtttaattttgtgggtattgttattgtattttgtcgtttaggaagtttataaattatataatgttttttacgtggtagttatttggtggttttgagttttagagattttgatttagtattttgattaggatatggagttgtttggattattagtggaatattaatttttatattttaatattgggttttagagttattttgtgaaattttttttggaaaggaaagatttgagttttaattttaattttaatgtgtattttaaacgtaggtttgagagttgggggatggtagatgttaagtagaaggttagattaatttttggataatattggtaacgaaaattacgtaggtagttgagaataaagtaaatgttttttatttttttttatttcgtttattatgttggtgatgaaaattgtaaaaatgagtttagtataaggttttttatttttttttttggtaagagataaggaatatattaatagttaaggttttagagggagttgatatttagataatagatttttttttttaaattttttaatatattaaaatttttttattttttttaaatatagttttttagagtttttaataaaattttttttttttttttttatatatagatgatattttttttttgttttttttttgtattaggtgttttattttgttttttttttgagtttggttgtttgttgttgttatttaggaaggttttgtagttatttgaattagtttagttattgttttttggggtttgattgtgggaattgtaatttttttaatgttgggtttatggttgtgtttttttttaaagaatgtttgggttgtttaatttttagtattttgggtaattgttgatttaaaatagtaagtttagttggtttgaattatttagggaaggttttggtgtttatagttttataattatttttataaatgaattaggaaggaaggggaggttgattatagtgaagaagagggttttttaaatatattttttataataagtatgtaggagaaaggaaagggaaaattgatagggcggtttatcggtttttagtagagtataatatagtttttttgtttgtatagggaggagaggttgtgattggttttttatagaagagattatattgagtttaaggttagttgtagtaagtgtgtgtaaaggtagtttaggtagatttttagtgggaaggttatataattattaggttttacgtgtagagaaataggagttgtagtggttacgcgagatagatgtagtgtttgtaggtgaaggcgtatatttgagtttttatatagttttaaggggttatagttggaattttattcggtttagagagtgaggtgttttaatataaaatgttatattattttttaggaaaaatgattgttttgttttaaatcgcgttttgttaattttttttttattttttttatattatagttgagaaataattttatattttttgatttatttatgaaaatattttttataggaagaggtatgtacgtgtatgtatatgtatatgtttaagtaaagaagttgatatgaaaatgataatataaagatagtggtaaggaattaagataagggaaaggtgtgtttattgagggagtttttttttaaataataggtagttttgttgatgttaaatattatgttaagtatgtaaataaatttttgtatttagtatttatattaatttaatgagttaagtattatttttattgaaaatgtggaaatcgaggtagtatagtagagaagttagtatataagttttagaattagtttgttttgtttttaaaattaagttttgttttttattggttgtgtaattttgggtaagttattaaatttatttagttttgattttttttttataaaaggggatgggatttattttataagattattgtgaggattaaatgagatatataaaatataaaagatagagtattaataatttaggatattaggttttttttatgattaaacgtttaaaaattattttaatttagtttattaaaaaaatgatttttaagttaaaaaaaaaaaaaaaaatatttagtttttgatgatttgtttgatttgaatgaattggagggttataaaattatagatatggattagtttttgaaaattttggagggagaattaatgatttttaagtattagaatgtattttgatttggatattttttagtttgtaagatggtaagttatttttttttttttttttttttttttttttttttttttgagacggagtttcgttttgtcgtttaggttggagtgtagtggcgggatttcggtttattgtaagtttcgtttttcgggtttacgttatttttttgttttagttttttaagtagttgggattataggcgttcgttattacgttcggttaattttttttgtatttttagtagagacggggttttatcgttttagtcgggatggtttcgattttttgatttcgtgattcgttcgtttcggttttttaaagtgttgggattataggcgtgagttatcgcgttcggttattttttttttttttttttttttttttttgagatagagttttgttttgttatttaggttggagtgtagtggtataattttggtttattgtaatttttgttttttaggtttaagtgattttcgtgttttagttttttaagtagttgggattatagacgtacgttattatgtttggttaattttttgtatgtttagtagaaatggggggttttattatgttgtttaggttggtttcgaatttttgagtttaagtaatttatttattttagttttttaaagtgatggtattataggtgtgagttattatgtttggtttgtaagttattttttgatttaaaatattttttaattatgaaggaaattgatttgattttgttatttttttttatttttgattttgggggtaggggatagataagtagaaattgttgaatatgatttttagtcggttgggtagttattttttagttatagtgagtttgatttgcgtgttttagtaggaagtaaggagttaggtttttttttagttttggggaataggagaagggtgggggaatttttgatttttttttttttgtagttaaagtagattagtttagggaggagatagggaaattattagagtaggttaagattaatttgaaggaagtgggagttagggataatttattaaaggaagtgtatgtgtgttttgtatatgtatggggtggattaaggaaaagatttattttaaaagaataaagtatgtttcgataaatttattgaaaggaatgatttatattggtgttttttgtttaaatgttgagattaatggtttggtgttttttttttgaaattaggttgttttatttatatgaaataaattgggtagaggttaatcgtgagagtttgagtttttttaagtaaatagtaaaagattttttaggtttaatagtttttatttttatttttaaggaaagtggatttattcggagtacgtaggttagaggaggtaggagaagagggttagttcgtgagtttcgggtatttggagaatatgaatttttcgggtgtattgtttttatgagggttatcgaggaatttatggattttttatttttcgtttagaatgttttttttttattttttttatttttttaaattttagtattaggggttattttagagttataaattttgaaaggattatttaggtgattcgggtttatatatttttttttcggggtatatttggtggtaggttagtaggtttttggttttagttggtggtgttatataattagattcgttatagagatttattttttattagttttaggttagaagtacgaagattgattttaacgatgtggtttgtttgggaggtaaggcggtaggcgttgttagaattgatgggaattgtggtataggtgggaaatttggtttaataaattttttattgatttaggggattattttttttgagttaagttttggtaagcggtcggcgaaatttataggttttttttttggttgcgtttttagtttttagtttttttcgttttagagatgttttaggagcggtttttcggtgtaggtaacgggtgttcgggcggtttcgtttcgtcgtttagagtttggaagtcgttattgcggtttaggataattcggttacgcggtcggcgtcgatttcgtacgttggagttcgttgtcgtacggcgttggtagtcgggggtggtgtttgaagttaggcgttttttgttttttcgtcggttcgggtgttcggttcgcgtcgttaggttttgggattttaggtcgtttcgtttagtagttcgcgttttgttcggtgcgtttagcgttttcgttttttattttaaatttttattttttgtgtttttaggggggtatttttatcggggcgggaggggggggttagttgtgtttcggtcgtcgagtggcgaggaggtgacggtagtcgtttttttattttcgttcggcgggtagcgttgcggggcgagtgttagtagagaggcgttcggtttttttttcgttttttcgcgtcgggggtaggttttgtttagtttgcgtttttttttttcgtatcgcggcgtcgtttcgttattcgggtatcgtaggtagggtaggaggttggagagtttgttgttcgttcgttcgtaaaatggttttttcggttggatagttcgttttgttcgttttgggtacgtacgtcggttgcggcgttttttgcgtcgcgcgatattttgtttttttcggttttcgtcgagttttttttttcgggggtttttgcgttcgtttgggagagtggagagaagcgagtagttttaatgggttggcgtttgggaggtaaggggagttattaagaatgataaagaggggattgttcggtcgagcgtcgaggttttttcgggaaagtggttgtttgggtcgtgcgtgagaatatttgggaaggggaagcggagtgtgaacgggtttgaattttaattcgtcgtagttgtgtgtttgtttagatatatgtttatatttatttgtttatttggttgtttttaagttcggtttagtcggcgtcgttggcgtgtagattgggtcgtttcggaacgggggtcggcgtttaattttttggtcgggttttgtttgcgtttttttggtattttttgtttatttttaagttttagcgacgagtagagatgtttaagatcggtagaggcgttttcgatttttttttagagtttttgagttttgggggtaggttttggatttttgggcggattaatggtttttttaattaatttttttgggagaagtggtttcggtgttcgtcgagggtaggagcgaaattttagatcgagtgttgttagttttttttgagtatgtttttggaaatgaaggagggatgggaaaggtgaggggaagttaaatttttttttcgggtcgggtttgcggagcggtgcgttttttggcggtgaagtttaagggtttgtttggacgcggtgagggcgtagcgtcgcgcgttttttggttaatttttgttttttgtgttggtgggtttttttggtgttgagatagttgattaatagcgtaggtgttttggttattgttagtttttcgtgaagtgaattgttcgttcgatatgtttcgagtttaattcgtatagtatgcggttcgttgtagggtggttagagtttgtggaaagttatggaattt

SEQ ID NO: 44 - DNA, 6074 bp, Artificial Sequence
  chemically treated genomic DNA (Homo sapiens)
gagttttatggttttttatagattttaattattttgtagcgagtcgtatgttatacgggttaaattcggggtatatcgaacgaataatttattttacggaagattagtaataattaggatatttgcgttattgattagttattttaatattagagagatttattagtataaggggtaagaattggttaggaggcgcgcggcgttgcgtttttatcgcgtttagatagatttttgaattttatcgttaaaaaacgtatcgtttcgtagattcgattcgggagaggggtttaatttttttttattttttttattttttttttatttttaaggatatatttaaaggaaattggtaatattcggtttagggtttcgtttttgttttcggcggatatcgaaattattttttttagggaagttaattaaaggaattattaattcgtttaaaaatttaaaatttatttttaaagtttaagagttttgaaaagagatcgagggcgtttttgtcgattttgaatatttttgttcgtcgttggggtttagaggtgggtagggggtgttaaaggggcgtaggtaagattcggttagagggttagacgtcggttttcgtttcgaggcggtttagtttatacgttagcgacgtcggttgagtcgggtttggaggtagttaggtaagtaggtaggtgtaggtatgtgtttgagtagatatatagttgcggcggattaaagtttaagttcgtttatatttcgttttttttttttaggtgtttttacgtacggtttaggtagttattttttcggggaagtttcggcgttcgatcggatagttttttttttgttatttttaatgattttttttgttttttaggcgttaatttattgagattattcgtttttttttatttttttaggcgggcgtagaaattttcggaaaggggaattcggcggggatcgggggaagtagggtgtcgcgcggcgtagggggcgtcgtagtcggcgtacgtatttagagcgaatagggcgagttgtttagtcgaggggattattttacgggcgggcgggtagtaggttttttagttttttgttttatttgcggtgttcgagtggcggagcggcgtcgcggtgcgggggaaaaagacgtagattaggtagggtttgttttcggcgcgggagggcggagggaggatcgagcgtttttttgttggtattcgtttcgtagcgttgttcgtcgggcggaaataggaaggcggttatcgttattttttcgttattcggcgatcggggtatagttgatttttttttttcgtttcgatgggggtgtttttttgagggtatagagggtgggggtttggggtaaggggcggggacgttgagcgtatcgagtagggcgcgggttgttgggcggggcgatttgggattttagagtttggcggcgcgagtcgggtattcgggtcgacgaaaaggtaggaagcgtttgattttagatattattttcgattgttagcgtcgtgcggtagcggattttagcgtgcggggtcggcgtcggtcgcgtagtcggattgttttgggtcgtagtggcggtttttaggttttaggcggcggagcggagtcgttcgggtattcgttatttatatcgaggggtcgtttttggggtatttttggggcggggaaggttggaggttggggacgtagttaggaaagggatttgtgagtttcgtcggtcgtttgttaagatttggtttaaggaaagtggttttttgaattaatgaagaatttgttaaattaggttttttatttgtgttatagtttttattaattttggtaacgtttgtcgttttattttttaggtaggttatatcgttaagattagttttcgtatttttggtttgggattgataaaaaatgggtttttgtgacgaatttggttatatggtattattagttgaggttaaaagtttgttagtttgttattaagtgtatttcgaaagaggggtgtgtgggttcgagttatttgggtggtttttttaggatttgtggttttgaggtggtttttggtgttggaatttggggaggtggaggggatagagggaagatattttgggcgaagagtggaagatttataggtttttcggtgatttttatggggatagtatattcgggagatttatgttttttaggtattcggagtttacggattgattttttttttttgttttttttggtttacgtgtttcgggtagatttattttttttgaaggtgggggtgggggttgttgggtttggggaattttttgttgtttatttggggaggtttaggtttttacggttgatttttgtttagtttgttttatgtaagtagagtaatttagttttaagaaggaagtattaggttattggttttaatatttgggtaggaagtattagtgtaaattattttttttaatagatttgtcggagtatattttgtttttttagggtaaattttttttttggtttattttatgtatgtataaggtatatatgtattttttttagtaggttgtttttgatttttattttttttaggttgattttgatttgttttggtggtttttttgttttttttttaaattagtttgttttggttatagaaggggaggaattaggggtttttttattttttttttgttttttaggattagagaaggatttgattttttgttttttattggaatacgtaaattaagtttattgtggttgagggatggttgtttagtcggttgagggttatgtttagtagtttttgtttatttgttttttatttttaaagttagaggtggagggaagtagtagaattaagttaattttttttatgattggaaaatattttaaattaagaggtaatttgtaggttaggtatggtggtttatatttgtaatattattattttgggaggttgaggtgggtggattgtttgagtttaggagttcgagattagtttgggtaatatggtaaaattttttatttttattaaatatataaaaaattagttagatatggtggcgtgcgtttgtagttttagttatttgggaggttgaggtacgagaattatttgaatttgggaggtagaggttgtagtgagttaagattgtgttattgtattttagtttggatgatagaataagattttgttttaaaaaaaaaaaaaaaagaaaaaaagagatggtcgggcgcggtggtttacgtttgtaattttagtattttgggaggtcgaggcgggcggattacgaggttaggagatcgagattatttcggttaaaacggtgaaatttcgtttttattaaaaatataaaaaaaattagtcgggcgtagtggcgggcgtttgtagttttagttatttgggaggttgaggtaggagaatggcgtgaattcgggaggcggagtttgtagtgagtcgagatttcgttattgtattttagtttgggcgatagagcgagatttcgttttaaaaaaaaaaaaaaaaaaaaaaaaagaaaaaaagagataatttgttattttataaattaaagagtatttaaattaaagtatattttaatgtttgaaaattattaattttttttttaagatttttaaaagttggtttatatttgtggttttataattttttaatttatttaagttaaataggttattaggggttgggtgtttttttttttttttttaatttaaagattatttttttggtaaattgaattgaaatgatttttaaacgtttagttatagaggaaatttaatattttaaattgttgatgttttattttttgtattttatatattttatttaatttttataataattttatgagatagattttatttttttttataagagaagaattaagattgagtgaatttagtaatttatttagaattatatagttaataaagggtagagtttgattttgaaagtagaataagttggttttgaggtttatgtgttggtttttttgttatattgtttcggtttttatatttttaataaggataatgtttaatttattgggttgatgtgagtattaaatgtaagaatttatttgtatatttagtataatatttgatattaataaaattatttattatttaaaggaaaatttttttagtggatatattttttttttgttttagttttttattattatttttatgttattatttttatattagtttttttgtttgagtatatgtatgtatatgtacgtgtatatttttttttatgggaaatatttttataggtgaattaggaggtatgaagttgttttttagttgtggtgtgaaagaaataagaaaaaaattgatagaacgcgatttagagtaaagtaattattttttttaaagggtggtgtgatattttgtattggaatattttattttttgagtcgagtgaaattttaattgtagttttttgaagttgtgtggagatttaggtatgcgtttttatttatagatattgtatttgtttcgcgtggttattgtagtttttgtttttttgtacgtggagtttgatgattatgtggtttttttattaagagtttgtttggattgtttttgtatatatttgttgtagttggttttgagtttagtataattttttttgtgagaagttaattatagttttttttttttgtgtaaataagagaattatgttatgttttattgagagtcggtaaatcgttttgttagttttttttttttttttttttatatgtttattatagagggtatgtttaaagagtttttttttttattgtgattagttttttttttttttttgatttatttgtggaagtgattgtggagttatgagtattagagttttttttgaataatttaggttagttgagtttgttgttttagattagtagttatttaagatattggggattgaatagtttagatattttttgggaggaagtatagttatgggtttagtattgaaggaattataatttttatagttaagttttagggagtagtaattgggttggtttaggtggttgtaggatttttttgggtgatagtagtagatagttaggtttagagggaaaataggatggggtatttggtgtagagggagggtaaaggagagatgttatttgtgtatgagaaagaaagagggaagttttattaaggattttggagaattgtgtttagggagagtgaggagattttaatgtgttaagggatttagaaaaagaaatttattgtttaaatattagttttttttggggttttagttattagtgtgttttttattttttgttaaaggaaaaagtaggaaattttatgttgggtttatttttatagtttttattattagtataatgggcgaggtaagaagagataagaggtatttgttttgtttttagttatttgcgtgattttcgttgttagtgttgtttaaagattggtttgattttttgtttaatatttgttattttttagtttttaggtttacgtttggaatgtatattgaagttgaaattgaagtttaaattttttttttttagaggagattttatagaatggttttaaagtttagtattgaagtgtggaggttggtgttttattagtggtttaagtagttttatgttttagttaaggtgttaggttagagtttttgggatttagggttattaggtggttattacgtgaaagatattatatagtttgtgaattttttagacgataggatgtagtagtagtatttataggattgagcgtagttgttgtgaagttattttattaagcgtgtttggaggtaggatagttttgtatttaattttgtttttttatttttgttattttttttagtagttttaattatatagttatatttttttggagattggaaagattgttttagtaggagtgtttttgggaaagttttaaattaagtatttagaaatatttaggtaagtatatttaatgatgttgatggaaatagggtagtgatgattaatagaagtaaaagagagataggagaaagaaaatatgaagaattaaggaaggagaaattaaagaattatagagagttgaaa

SEQ ID NO: 45 - DNA, 5969 bp, Artificial Sequence
  chemically treated genomic DNA (Homo sapiens)
ttaaggaggaaggatttataattgatttcgttgttttttattagtgttaaaatagattagtttagtgatgtttaagtggatacgatttagaagcgagacgtaaagaggttaaatacgggtaaatcgtacgtaaaattttgatattattgtaatacgttcgtggggtgggggtggtaagagtgttttagtatcgtagtttcggcgtagatcggaatttcgtagttattttggtggtttcgtggtgggaaagacgcgttttagcgaatcggtcgcgttattttcggagtacgttgggaattacggtaggttagggcgtaaagagagtagtcgggcggttttttggtgttatttgttggtttttcgtgtgtggtaagtattgtcgttttttcgttgattatttgttgggttattgtcgagaattacggttggggtgagaattgtggtttggcgttattttttagtgagggttattttggtgttcggaaagggcgttgggttattagtatattgttacgagtgggagtaggagttttgtagtcggatatcgtggattttgtttttgtttttttcgttttggttgtgtggttttttataggttatttaatttttttggggttaagttgttttatttgtgaagtggggattatagtatttatgttatgagagcgtttgaggagatgataggatgtatgagaaatgttttgttttttaaataaatgttggttttattattgttcgtttttttttgtttttttgttttttgatgttgtttttgtttgttttgtttttttgagataggattttattttgttgtttaagttggaatgtaatggtatgattatagtttattgtagttttgaatttttgggttagagcgattttttcgttttagtttttggagtagttgggattataggtatattttattttattttaaataatttttttattatttttagtagagatagggttttgttatgttgtttaggttggttttaagtttttgggtttaagtgatttttttatttgggttttttaaattgttgggattataggcgtgagttattacgatcggtttttaatttttatttattttgtttttttttaatggaacgaaagttttatgagattagaggttttgttttgatagattttaataaatgtataatattgtatgattattattataattaagatttaagatagtttcgtttttttataaaattgttttagttttttaattaatttcgtttattatttagtattagtaattattgatttgttttttttttttatagttttgttttttttagaattttatatatagggaattgtcgtggtttgaatatttgtttttttaaaattcgcgttgaaatttaatttttagtgtggtagtattgagaggtggggttttgaagaggcgattgggatatgagagttttgttataatgtttttataaatgaattaatagattaatgggtttaggggttaatgggttaatgggttatcgtgggagtgggattggtgtttttataaaaggaagaagagagatttgagttagtatattgaggtttttcgcgatgtgatgttttatacggttttaggatttaatagagtttttattagtaagagggtttttattagatgtagttttttaatttcggattttttagtttttatgagaaatgtttttgtgggattttttttatttaagtatattgtttttaagatttatttatgcgtttttttattttttcgtttttttttgtgagataaggtttggttttattgtttaagttggagtgtagttgtatgatttcggtttattgtaatttttattttttaggttttatttttattttagttttttaagtagttgggattataggtatgtattattatattcggttaatttttgtattttttgtagagatgggtttttgttatgttgtttaggttggtttttatagtttttagttggtgagttgaagaaattcgtttgttttggttttttaaagtgttggaattgtagttatgagtcgttgtgtttagtcgtatatgtatatttgtattatttatttgtttttttttattattggtatagaagggatgttttataggagtaggttttatatagggttgtttttttgattttaggttattatgagtaaaattattataaatatttatatataagttttgtgaatatagttttttattttttttgggtaaataatgtttaggtgtgggagtgttgggttatagtggttttaagggtaaatgatttttagttttgagttttttttttttagattttagttttttgttttaggtattgggatatattagtaataagaagtagtaagtttttttttttatttaggttatatttcggggatggagatagaaatatataaggaaagaataaataatatgttgtttttaaagaaattgtgtaaaaagaaaaaataaataagatgtttttgtatagtatagtagttatagagtaatgggttagaaagtggggtaggaggagaagttttttttagggaaagattttgagttgagatttgaggttttttaggtaaggggacggtgaatgtaagggtgtgtaggttatagggggataagttgggtgtgtttagtaattgtgttgggagttggatttagtagtgggggtttttattagagaggaggtagtattgagatttgggtaggaagttggggtttattttaagtttttttgaaaattaaagaagggttttaatttaaggattgtttttttttttttttttttttttttgtttgtagatagggttttgttttgttatttaggttggagtgtagtggtataattttagtttattgtaattttcgtttttcgggtttaagtgatttttttgttttagttttttgagtagttgggattgtaaatgtatgttattacgtttggttaatttttgtatttttagtagagacggggttttattatgtttgttaggttggtttcgaatttttgtgtttaagcgatacgtttttttttggttttttaaagtgttgggattataggcgtgagttatcgagttgggttaggttttaggtattgttatgatgtaaaaatttttttttagaaaagagaatattagttttttagttggttttttgtagttaggagatgtaagagtagtagttgaatttgaggtttgttttggagaaagaattaaaagtagatatggatggtttggatgtgagggagggaaagagaattttaagtgtattagtagtggtgggaggaggttcggtatagtggtgttatttggaagataaatcgttggtgtttaatttttatgattcgaaagttttttataagtttgatatattaggtaaaatgtttgattgtattaagttttagtttatcgttataaaataggttatgaaaattgcgtgagaaaatgtatataatagtttaataaataatattggttgggtgtggtggtttatgtttgtaattttagtattttgggaggttaaggtgggtagatcgtttgaggttaggagttcgagattagattggttaatatggtgagattttttatttttattaaaaaaatataaaatatatttgggtaaatatggtgaaattttatttttattaaaaatagaaaaattagttaggcgtggtggcgcgcgtttataattttagttgaggtacgagaatcgtttgaattcgggaggcggaggttgtagtgggttgagattatattattgtattttagtttgggcgatagagtaagattttgttttaaaaataaaatatatatataaaatataatagtatttgtttgtttgtttgtttttgagatgtttcggattatagtgcggggattatagacgtgagttattaagttcggataatattattatattgtttattgtatttttataatatttttaaggggtaggaatttttttttttagtttttttttttcgattttatcgagagatagggtttcgttttgtcgtttaggtttggagtgtattggcgcgattaaagtttattatagtttagattttttggttttaagcgattttttagtttgggttttttaaagcgttaggattataggcgtgggttatcgcgtttgattagttttttttttttgtagttgagttttaagagtttgtttaaagagtagaggtgggttgaaggtataaagcgaatgaaagaataggttttcgggtatcgttgtacgttttatttttttttaggggcgttgtattttagtttttttcgtatatgcgtattgggttttttatcgtttttcgtttttagtaaagtttttcgttcggagtatgcgcgggtcgtttggcgttaattgttgatcgttatagttatagttagggttagtttcgtcggttttcgggtggcgcgcgttcgttgtttttttagttttaggatgatcggttagaagacgttttattttttttttttttttagtttcgttaggaagcgatacgtttttagtttcgagtcggtcgtttaggggatcggcgtggttggggtgtttgaggaaagcggagatgcggcggtgaggcgcggtttgggtcggggttagggggtgaagggggaggaaggcggtgggtttcgtttgacggagggcgtgtaggatcgcgtttttgattcggtaaattcgggtttcgttttttaaatagtttttacgtgtttaaaatagtcgtcgttgttttttatgggtcgttatgttaaagggttagttaatgggaacgcgtttcggggtttatggcgttaattcgcgcgtcgtaggtttttttggttcggtgcgttgtttaattagaggggagagggggcgggatttagagggaggttttttgtcgcgaaaagattacgtggggacgcggtggggcgggtttggcgggggcggggtatttttgtgtagggtttttagttatcgcgacgtttttcgggaagttatagggcgttttttagttcgttttttcgttttagtttagaatttaatttttaattttcggatcgggtttagttttgggtttttattgttcgtttttgttgggatttgttttataaatgggcgttttttgttttgggtcgtgggggttgggtcggaagttgcggacgtttgggaaggggtcgttgtagtttttgagtcgtttttgcggggattatttgtaggttattttagttaagaaggtttcggttgggtaggaggagtttgggacgtcgtttttttcgtcgttgagtgtcgagtagttggatcggatttagaggaataaggtcgcggttttgtttagattcgcggttcgtaacgtgttcgtgggttttggagagagttggaagaagtattttagcggggagttcgggaaatcgtattttattaaggtaaatatggaaatgtattttttataagggtaaatgtggaggttgtcggtttttttgttttgttagtgtagtcggttaagtttatgttttcgtaggtttaggttgtattttttttaattttttttatttataaagggggtaaaagaaagttatgatgttttattttgtagttttatattggttaaagttgttaacgattcgcgagatgatattatggatttatttaagttatatagtttattgtttaggaaaggttggcgtagtaaaattattaattattttgaatgaaatttggtttgagttttaaaaagtcgagaggagtggtattgttaggatttagtttagagaaagaggtaaggaattgatttgattgaattatttaggtgggggggtaggtattgtttttgtttgttgttttttaaaagaatttggatataatatgataaagaattaatgatgttttaaataatttgtattagaagtttttttattgaatttttatggtttttaatgagaatttgattttaagtttagtttatttttaaattagt

SEQ ID NO: 46 - DNA, 5969 bp, Artificial Sequence
  chemically treated genomic DNA (Homo sapiens)
gttgatttaaagataaattagatttaaaattagatttttattggaaattataagaatttaataagaaagtttttagtgtaagttatttggaatattattagttttttgttatgttatgtttaaatttttttaaaaaataataaataaaaatagtgtttgtttttttatttaagtggtttaattaggttaattttttgtttttttttttgggttgggttttgatagtgttatttttttcggttttttaaagtttaagttaggttttatttaggatggttggtgattttattacgttagttttttttggataatagattatgtgatttaaatgaatttatgatattatttcgcgggtcgttaataattttaattaatataaagttgtagagtgaaatattatggtttttttttattttttttgtgagtaaaggaggttgaagggggtataatttaagtttacggaaatatgaatttggtcggttatattaataagataaaagggtcggtagtttttatatttatttttatggaaggtgtatttttatatttattttgataaaatacggtttttcgaatttttcgttgaggtgttttttttagttttttttaaagtttacgggtacgttgcgggtcgcgagtttgagtagggtcgcggttttgtttttttggattcggtttaattgttcggtatttagcggcgaggagggcggcgttttaggttttttttgtttagtcggggtttttttggttgggatggtttgtaagtggttttcgtagaggcggtttaagagttgtagcggtttttttttaggcgttcgtagttttcggtttaatttttacggtttaaggtagaagacgtttatttgtggaataggttttagtaaaagcggatagtaagagtttagggttgggttcggttcgggaattgggaattaggttttaaattggagcggggagacgggttgggaggcgttttatggtttttcgaggagcgtcgcggtgattgggaattttgtatagaggtgtttcgttttcgttagattcgttttatcgcgtttttacgtggttttttcgcggtaaaaaatttttttttgggtttcgtttttttttttttttgattggatagcgtatcgagttaggagggtttgcggcgcgcggattggcgttatgggtttcgagacgcgtttttattggttggttttttagtatggcggtttatgggggatagcggcggttattttgaatacgtggaggttatttggaaagcggagttcgggtttatcgagttagaggcgcgattttgtacgtttttcgttaggcggggtttatcgtttttttttttttttattttttagtttcggtttaagtcgcgttttatcgtcgtattttcgttttttttaggtattttagttacgtcggttttttggacggtcggttcggggttgggggcgtgtcgttttttggcggggttgggggagaaaaaggagtagagcgttttttggtcgattattttggagttgaggaggtagcgaacgcgcgttattcgggaatcggcgaggttagttttggttgtggttgtggcggttagtaattggcgttaagcggttcgcgtatgtttcgagcggggggttttgttgggggcggggggcggtggaaggtttagtgcgtatgtgcgggaggggttggagtgtaacgtttttgggaggaggtggggcgtgtaacggtgttcgggggtttatttttttattcgttttgtgtttttagtttatttttgttttttggataggtttttaaggtttagttgtaagaagagaagattggttaggcgcggtggtttacgtttgtaattttagcgttttgggaggtttaggttggaggatcgtttgaggttagagggtttgagttgtagtgagttttgatcgcgttaatgtattttaggtttgggcgatagagcgagattttgtttttcggtggggtcggggggagggggttgggaagaaaagtttttgttttttaggggtgttgtgggagtgtaatgaataatataataatattgttcgggtttgatggtttacgtttgtaattttcgtattgtaattcgaggtattttaaaaataaataaataaataaatattattatattttgtgtgtgtattttgtttttgagatagagttttgttttgtcgtttaggttggaatgtagtggtgtgattttagtttattgtaattttcgtttttcggatttaagcgattttcgtgttttagttaggattataggcgcgcgttattacgtttggttaatttttttatttttagtagaaatggggttttattatgtttgtttaagtgtgttttgtatttttttagtagagatgggggattttattatgttggttagtttggtttcgaatttttgattttaggcgatttgtttattttggttttttaaagtgttgggattataggtatgagttattatatttagttaatattatttgttgaattgttatatatatttttttacgtaatttttatggtttattttatgacgataaattaaggtttagtgtagttaaatattttgtttaatgtattaggtttgtgggagattttcgggttatagaggttaaatattaacgatttgttttttaaatgatattattgtatcgaatttttttttattattattaatatatttaggatttttttttttttttttatatttaaattatttatatttgtttttggttttttttttaaagtaaattttaaatttaattgttgtttttgtattttttagttatagaagattagttgggaagttggtgtttttttttttagagagagatttttatattatgataatatttggggtttggtttagttcggtggtttacgtttgtaattttaatattttgggaggttaaggaggggcgtatcgtttgagtataggagttcgagattagtttggtaaatatggtgaaatttcgtttttattaaaaatataaaaattagttaggcgtggtggtatgtatttgtaattttagttatttaggaggttgaggtaggagaattatttgaattcgggaggcggaggttgtagtgagttgagattgtgttattgtattttagtttgggtgatagagtaagattttgtttataaataaaaaaaagaaaaagaaaaaaaagataatttttaggttaaaatttttttttggtttttaaaaaggtttagaataaattttagttttttatttaggttttagtgttgttttttttttgatggaagtttttattattgagtttagtttttagtataattgttggatatatttagtttgtttttttgtggtttgtatatttttgtatttatcgtttttttgtttggaaagttttaggttttagtttaggatttttttttgaaaaggatttttttttttgttttattttttagtttattgttttataattgttatattatataaaagtattttatttattttttttttttatataatttttttagagatagtatattatttattttttttttgtgtgtttttgtttttattttcgaaatgtaatttgagtgaagaaaggaatttgttgttttttgttgttggtgtgttttagtgtttaggataagaagttgaagtttaagggagagaggtttaaagttgaaaattatttgtttttagagttattatgatttagtatttttatatttaggtattatttatttaagggaaatgaaaaattatatttataaagtttgtatgtgaatgtttatagtgattttatttatagtaatttaaaattagagaaataattttatgtggggtttatttttgtggggtattttttttatattagtaataaaaaggaataaataagtaatataaatgtgtatatacgattgggtatagcggtttatgattgtaattttagtattttgggaggttaaggtaggcggatttttttagtttattagttgaagattatggagattagtttgggtaatatggtaaaaatttatttttataaaaaatataaaaattagtcgggtgtagtggtgtatgtttgtagttttagttatttgggaggttgaggtgggagtggagtttgggaagtggaggttgtagtgagtcgagattatgtaattgtattttagtttaggtagtagagttagattttgttttataaaaaaaagcggggaggtgggggggcgtataaatgaattttaaaagtaatatgtttaagtgaaagaagttttataaaggtattttttatagaggttgagaggttcgaggttgaggggttgtatttggtgaaaatttttttgttggtggggattttgttgagttttgaagtcgtgtagggtattatatcgcgaggggttttagtgtgttagtttaggtttttttttttttttttataaagatattagttttatttttacggtaatttattaatttattaatttttgagtttattaatttattaatttatttatgaggatattatgatagagtttttatgttttaatcgtttttttaaggttttattttttaatattgttatattgaggattaaattttaacgcggattttggaggaatagatatttaaattacggtaattttttgtatatgaaattttggaaaaggtaaaattatagggagagaagatagattagtggttgttgatgttgggtgatgggcgaagttgattaagaggttggagtagttttatggagggacggaattgttttagattttgattgtggtggtgattatataatattgtatatttgttgaaatttgttaaaataaagtttttgattttatggagttttcgttttattgaggggagatagagtaaataaaaattaggagtcggtcgtggtggtttacgtttgtaattttaataatttgggaggtttaggtgggaggattatttgagtttaggagtttgagattagtttgggtaatatagtaaggttttatttttattaaaaataataaaaaaattatttagggtggggtgggatgtgtttgtagttttagttattttagaggttgagacgggaggatcgttttaatttaggagtttaaggttgtagtgagttatgattatgttattgtattttagtttgggtaatagagtgagattttgttttaaaaaaataaaataaataagaataatattaaaaaataagaaaataaagaaaaacgagtaataatggaattaatatttatttagaggatagagtattttttatgtattttgttatttttttaggcgtttttatgatataggtgttgtagtttttattttatagatgaggtaatttaattttagagaggttaagtgatttgtgggaggttatatagttagggcggaggagatagaaatagaatttacgatattcgattgtagaatttttgtttttattcgtgataatatattggtggtttaacgtttttttcggatattaaagtaatttttattgagaagtgacgttaagttatagtttttattttagtcgtgattttcgatagtggtttaataggtgattaacgggaaagcggtagtgtttgttatatacgggaggttagtaggtggtattagagggtcgttcggttgttttttttgcgttttagtttgtcgtagtttttagcgtgtttcggaagtgacgcgatcgattcgttggggcgcgttttttttattacgaggttattagggtgattgcgggatttcgatttgcgtcggagttgcgatgttagagtatttttgttatttttattttacggacgtgttgtagtgatattagaattttgcgtgcggtttattcgtgtttaatttttttgcgtttcgtttttgaatcgtatttatttgagtattattagattgatttattttaatattggtggggggtagcgaggttagttatgggttttttttttttaa

SEQ ID NO: 47 - DNA, 11523 bp, Artificial Sequence
  chemically treated genomic DNA (Homo sapiens)
attgtttaagacggaaagattttaagattgtgtgattttttttttttttttttttttttttttttttttataggtgtagaataattttttttttttttttcgtggttttttttttttttattttttttttttgttgtttgtaaagttgaatttggggttaggagttttaattgtaattttagattggaattttagatggtgcgtttaggattggaagtaatttttagtttattaattttatgggtttacgtatttgttttggttacggtttggtttttatttttattgtggtattaatgtagaataaattgagatatattttttatataattagttttagaatttaaaaagatttacggtataataatagaggtagtgtcgcggaatttttttattgaggattttcggggagttcggggattatttcgcggtggtattagaatagacgagtaattttagcggttttaggtattgcgaattgggggagagggggaaattttgtatcgtattcggtagtatttaacggtttcgggtttttagatagggttagcgaggagagttaggatagtaagtggggattggttaaaaaaaatcgatttaattttgaaatgattagaagaagttgggagtagttattataaagttttttttttgtttttttttttttttaattgaaggaatgacgttgaaatttttatcgttagcgcggggttgggaattattttaaatatttgttttgtagtttcgagtgggtagatttcgaagagttggagtcggcggggaggggaggaatagttgttgggttgttttgcgcgtggggttcggggcgcgggtttcggggagaggcgttagtcgaaagtttgtttttttttcgcgataggtagtagcgaggtcgagttattttttattacggtttgcgggtttcgcgcgtagtgtggttgttttcgtttttgatcgatcgtagcgttttggggtgtttatttagttgttcgcggtcgttgggtgattttcggagggcggtttaggcgtgcgtattggtttttggggttgcggttgtagtagtttagtttcgcgttttgttagatgtagtggatagcgtcggggtgaaagtaagggttgagaaatttttattgttttgtttttatttagtttcgatttttttatattgtaataattatgtattttcgaggtcgggatgtttgcgttttgttagtgtattaacgttatatggttttttaggggttgttttcgtttttgtattttattagttttgaagaggtagaggggtggtgggtaaaatttttaattggacgttgagagattcgggttttagttcggcgttgttattaatttgttttttgtttttaaatagtagtagtaataaaaattgtaaagttgattgagttaaaggtttatattgtttttttatttaatttttagaataattttatgaggtgggcgttagtattttattatttcgtttgattagtaaggaaattgaggtttagagagattgcggaattcgtttagggttatatagttgttggttatttggtagagttgaggttttattttggggttattaattttttgttttttatcgttgcgttttatagattgtttttttttcggttgtttgggttttagtttttttttttgtaaaacgagaagtttaatttgtagttttttttgttaatcggtggtttagattaggaatttttgttatagatttcggcgttgataggggtaagaaggtgggtgaaagaagggggcgtttagttttttatagtttgtttttttttgggatttcgcgaagggcgggtttcgcgagttaaaggaggtataggagagcgtttatcgttcgcggcgggtgaaggtgttatttgttttcgtgttaggttgtgagttttggtgtttagtttagggcgttaaggttagtgtagttggtatgttttttttggaaaattttaggtttttcgtagagaacgttatttataataaagaagaggatagagaggtatggagcgttttgcgattgtaggagtacgttagttttttagcgttggtttagtgtcgtttgggttttcgggtatgtggattcgttggggtcgtacggagattttttgtcgggtttttggggtttttcgattgcggttttttagtttagtattttttttttggtttcgtaggttgtagggaattttttttatttttttagtcggagaagtttaagtcgggcgagggggtatttcggggttcgtatcggtgtttttttttttttcgtttttataaggattttgagaaaataaatggtagaggagagaggagttttatatttgtttggtttttttttttttttatttatttttatattttttatttcggggtaaaaatttatttttgaaaaatgttggtagagatttacgtgtttttgttttatttgggttttataaatataacgatttatatttaagttagtttttttttagataatttttttttttttcgttaaaagtgttaaggatggtaaaagaagaaataattttaattttttcgtttggaaatgaaagttttcggttttttataaagggtttttcgttttttatagttgagttttagttaagaaaaacgatttttaagtagaaataataggcggggagaaggaagggagatatagggatttggggggtttttagggtaattggtagtgaattttgtttcgagagttttttttttatttaaaaaattaaacgcgcgagtttcgcgaaaggtttagggatagatcgtgtgggagaggattgagtagagagcgtgggggtagtgttttgtagaatttttttttttttaataataattttaaaagtttttgagtggagacgacgtaaagttaagtagtaaaggtggtttgggaggtaagcggagggtttaagtgtcgtatttttatttttagggttttttgcgtttacgggatgcgtatttttaagaagtgcgtttttcgagtaagttttgggttcgtatatatttcgggttcgtagttagaatttaatggcgataacgtttatgtaatgtaagttaaaaattaaagcgtaaaaaattattatgttatttattgaaacgttattttttgttaaattgtaattattttgttttatataagtttggttggaaagtttgtagttttagttcgggttagttaggtataggaggtcggattgtaatcggttgtttttttttcgtcgcgtttggtcgttttacgttgcgtcgtcgttgttgttttttggcgtttttgggattttatacgtatttttgaaatacgtttcgtttcggttttcggtttttttttttgtttaggggttgttttttaatagatattgatttttttagaagatttaaaaattaaattaaaatattttttattcgttttaaatatttgttttggggcgcgggggttgttaaatagagattagacgaagggagttagatttagcgaagtttttcgagtttttaaagattcgaatattaattcgcgttcgtgggtcgatggaggttttttttattttattttttggtttttttaattggttttcgttttttggttaattattgagtaattagaatggtattttcgattagggttataggtagtgttcggcggagtggttttaggagttattcgttttttgtcgggtttcgtatttaaatttttttttttattttttttttttaaattgggcgttaggatgtttcggtcggaatatacgtaggttttgggcgtttgtttaagggttttttttttttttaaattagtcgttgttttttcggtttaatcgtagaagaattagatattttttattggaaagggaaattaagtgttgttgattttaattttaggtaggcggtaatcgtttttcgtttggcgtaaattttattaagtaaataattattagtcgatcgaaatacgttcggtttataattggtgtaattttcggttatttaattgagggacgttcgtttttagtttcgatttttggaatttataaagggttatttttttttttagtgattttaagattatggttatttttttattcgatagttttagaagtaagagttagatttaagggtgtaaagtaagggtatacgtttttttgaagtttgattgagttttttttgcgtttttttgaagttttcgtttttttggagtttatttgtttttttttttaaattatttttttagattaataattttatttttatttttatcgtattcgattttgttcggatttattgtttatttgaacggattttttagtgagacgaggtttttatattggcgaaggttaagaaggggaggtggggggagggttgtgttatatcggttagttgagagcgcgtgttgggttgaagaggagggtgttttcgagagggacgttttttcggattcgtttttattttagttgcgagggcgtttttaaggagtagcgcgcgttgtttggtcgggtttgggttgttgagtgaatggagcggtcgagttttttggttttttttttttttcgcgtcgtcggttttttttatttgagttttgggaagttgagggtagttaggtagttggggtaaggagtttaaggtagcgtttatattcgggggtttttcgtaattcgatcgtttgttcgtttttttatttttcgtttttttttttatttatttatttatttatttatttatttagagtcgggacggtagtttaggcgttcgggtttcgtcgttttttcgtcgcgattttggatttttttttgttgtaggattcggtttttacgtgtgtttcggagtcggcgttttagtatacgtttcgtttcgggtttgggtgtttatagtagttagagtagtagggagttcgggattcgggcggtatttgggttaagttaggcgtcgtcgaggttagcgttgaacgtttttagggtcggaggagtcgcggggcgttcgggtttgagtcgtagtaaatgggtttcgacgtgcgggatttgaacgcgttgttgttcgtcgttttttttttgggtggcggcggcggttgtgttttgtttgtgagcggcgcggcgtagtgggcgtcggtgttggattttgcgttttcgggcgtttcggtttacgggtcgttgggcggtttcgcgtcgttatcggtttcgtcgttattttcgtcgtcgtcgttttatttttttattaaataggagtcgagttggggcggcgcggagtcgtacgaggagtagtgtttgagcgtttttattgtttattttttcggttagtttattggtatagtcggagtttgtcgttacgggtttttcggttttttttcgtttagttaggcgttattcggttaggttaggatgttttttaacgcgttttatttgtttagttgtttcgagagttagttcgttattcgtaattagggtaagtaggtcggggagcgttttttacgcgcggggtagtggcgttagggatttttcgttttaggatattttttttttttattttttttgatcgtagtttttatttagttgttttttaagggtcgtgaggatagcggaagcggcggttggggaggaggtcggagagtgggagtgtacgtaggtattggttttcgatattttttaaagttaggtagagttaggagtttgattgttcgtaagagtcgggagggcgtttggggttttttagagttcgagagatttcgggattgttagtttttacgggagtggaattaggagatcggcgtagtgtttggttttgttttggggagagttttgttaattaaggaaacgttaaattgttattaagcgtagcgttttttagacgtttggattttggattcggagtgggattagcgcgggggtgagcgtttgtgttgtgttgttttcgtagcgttaaaatgtttaggagtatttttagtttttataatacggtgttggtatatatttaggtgtatattaagtatcgtagagaattagaatgagtatatgtatttttagtaattaaatggttttttggaatagcgtcgtgttcgtggatagttttcgcgtatggtaatatagaagtggatttttattgggtttcgtttaggcggcggttacgtaggttttggggatggaagagaatttgatttattcgagtttaagttatgcgggattaggttttatcgtaggtagtggaaggaggtacgagttttggttttttttttagcgtatttggggcgtttttttattttgtaaacgcggggtttagttgggatagtatttttttaagatttggggttagaataaggatagggttattcgttgtgtttagttaggatataaggagggaattcggtatacgataagtattaggttggttttttatttcgcgtcgatgttcgtttatttttttttcgtttgggcggcgcggattcgaatttgcggagtttttgtagtttgttttttttatttatttttagtggatttttacgttattgagaatttaagttagttcggtttgattcggtaatttagtaaacgttttattaatataatggcggatgttttttttggagtaaaattattcgagggtttagggatcgggatgtttttggaatgcgtgggaagtagagtgtattttttgtaggaggtattttcgtttaaggttcgggagaagggttttgtttttgttgttcgtttttattcgcgttttttaaacgcgcgtttttaggtcgtttttattttagtttaattaggagtattcggttttcgcgaagttttggagaaatcgaaatcgttttttttttcgggagaatttgggattattgttttgtggaggaatcgtaagtagatttaagggttgtttttattttatgtttttagttagtgaaattagtgttttgtatttaaggggcgttgggataatttattggtcgttgaggtttgtgttttttgattagatcgcgttatttttgtttagtaggttggtgttatttttggggagtttttaggttttagtgttttcgtttataagaggatagttgagatgggtaatttggagattgggttcggtttgaagttatattttatagatgtagaagcgttatttattatttttttggggttttaaatatggaattcggtaatttatttaaatatttgtgattgagaaataatgaattcgagagtattgtttgtatgtgtgttatttggaggcggttgagaaattatcgaatttatgtttttggggtataaaatattattacgttattatttttttagtatttttaggggatttttgaaatttgggttttgtcgtttcgtttgggttttttgtttagttttttttagggtaggtttggtgtttgggattttattatatgtcgtggggggtgggattgtgggttttgtagttagtaggtattatatttttggaaaatatttggatttttttgtaatatataggcgtggttgttatggagaaaaagttaaaaggggattaggattagtaggtgaatgtattttttttttttattttggagaaaaagtttaatggagagagggttttagatttaagttatatagtttggaagtattatttttaggtttaagttttgttttgtagtgaaaatagatgggtttattttatttagtttttgaggtttattgggtagtttggatgtgagaagcgtttcggttgttattttggagtgggtaagggtggttttcgagattttgggtttattttttggatttttagggtttttgttgtttttttaggaatgtagggtttggtttaagatttgggttgtgagaggtaagggtattaatttttaaaaatgtggaaatggttattagagcgttaaggttaaattttaggggagaggaattaaggtcgtttttggatttttagggtagtttagttatggtgtataggtaggggtaattgttggtatttatttataatcgtttaaaattttataagtatgtttatattttaaatttttaaatattatattttgtattttaattttgtaaatattaatttagtaaatattaatcgtttatttggttaggtattgggttttgaatattaattaagataatggtttcgagaatttttgtaagaagtttattagttaattttggagaggttttttgttttggatgaggaaatttaggttttatgagattaggtggtagaggtgggatttgaatttagattatgttagggtgtttttattttttttttagggattttggttttatcgttgagatggattttttttggtttgcgggaggggtattaaatttttagtttatgtgtgggggttgacgggtttgtgagggtagatgtggggtgaggatttgagtagttttagattagatgtaaggtttaaggaggaggggaaaaaagtttgtttgggtcggacgcggtggttcgaggcggttggattatttgaggttaggagtttgagattagtttggttaatacggtgaaattttgtttttattgaaaatataaaaaaaaaaattggtcgggtttggtgacgggcgtttataattttagttattcgggaggttgaggtataagaatcgtttgaattcgggaggttgaggttgaagtgagttgagatcgcgttattgtattgtagtttgggcgatagagcgaaatttcgtttcggaaaaaaaaaaaaaaaaaagaggttgtttgttagtttattgatttcgtagtttcgtaggttcgtagaattttaaggtatgattaggtttgggattattaggttattttagggttaggtgcggaggtttgcgacgttcgagggttaaaggttttttttttcggttatataggagagggtattttgttgggggataggttttttttaattatagtgtagttgtagttatcgtttttagttttttgagtatttttttggttgagtttgttgtttattttattttttagtttttacggttcggttaggttaggcggttttcggtttttttgtagtcgtcggcgggggaggagggtatagagcgcgtttcgttttttagcgtacggttaaggttgcgtttttttttcgggtcgggattaatcgtgggaaaggcgttattttggttattcgattttttttttttaaggtttgtataaggagtttttgaatacgttgttttttttagtcggtagttttattttttttggtttttgttttcgtatttttcgcgttaggttaagcgttgggtttagggatagcgcgttttaattaaattcgtgttcgataagtttttaattaaaagagattttttttcgtttcgtaggcgtttttattattgtttttttcggggggatttgaaggagagggtttgaggtcggtttttgttcgtcgaggtttgcgtgttcggtttgggaggaggtttaggagggttcgcgggttacgggtatttttgggttcgagttttggggtgcggacggacgtttcgagagtgggtgtcgcgattcgggatttacggttttcgtcgggtacggatagttgcggagtagggttttgaggattgtgtagtgttttgggtttttgtttatttttgggtttaggaatggagaagggttcgtttagagaaaattttttcgtagtttttatttcgtttttttttttttttttttttttttttttttttttttttttttttttttttttttttttgtgtttgtttttttttttttttttttttttttagtgtttttttagaaattcggtttttatttcgggtaatagtgggtgttttgagttaaatttcgtttgtaagtttatttataggttttaaagaaggttaggttttaggttttaaaaggaagtttgtggaagtttaaacgtgttcgtttatgtaggagagttaacggggtcgggggttatttttgtttatttagtaggagagaaatggaggttttcgaggttatatgataaaagttagtggttttttaaatttttagtgtgtggtgttgagtagtgtgtgagatttaagtttggatttgtattattcgggagttaggatttgtttttttttttttttttttgtattttgttatattattttttaggtttatgtttttgttgttttagagaagttttttttttttttttttttttttttttttttttgggcggggggtggtggtgtgtgtgtatgagcgttcgtgtgtgtttcgaaaatggaggtaacgatgttttgggttttgtttatcggttgagttttgtttaagtttttggaggtattttggttaaatagtgtaagagtgggagaatgggtgttgtttgatttaatttatttttgagaattttgtgaagtttggagatttagggtagttttgggttaggaggatttgaggttgttggggtggttttgttaggattttataggagtagttttttttagttattgtgtttggattttaggttatagatttcggaatttgtagaggaatgagattttatttttgggtttcggggttaatgacgtatttttagtcgaaggatttttttttttagaggtagtaatagttttttagaagtttgtggggtataagtttaaagtaatttaataataaaaattataaaagattatgttttttaattgaggttttacgtttttttttttattttgggggggggggggaatgttaggatttttttagggggaaattgaggtaaaggatcgaagtattattatggagggaaagggagatatagtgttaggtatattttaaaggaaattggttgtttagtttggggagtgaggaagttggtttttatagtagtggttagggtcggatttttgggcgtaaggtgggttttataggggggaggaggaggagagcgtagggtcgttatttgaaggtttaattggaaggggtttttgtttttttttttattagtttttttttgggtgttatggtgttaggtcgggtagttttagatagataatattattcggtaattattttttttatttttaagattaggttatttaattggtttcgagtaattaatgaaagttggtgcgcgggtttttgatttatagttcggagttaacgcggggttagtttagtagatttatttcgtttgttcgcgttgtttttgcggaagagttgtagtttatttttggggggtgaataattttttttgtcgattaggtaacgagttttatatttaatttgttaggggttcgttgtagaagcggtagagatcgtagaagattgcggtataaataaattgggaaaaagcgaggtgggggttttagttagaaaaggatggagaagtttgttttaaggttatatttagggatttgggtcgtttttttgtcgaaagttttggaggtttgtggggttggattttttttcgttgggggttcgaatgcggggtttagcgtatatttttttcgttcgtggttggtttagatttattgtttcgttttgcgagagtatcgttgatattgtgttttttttcgtcgttttcgtagg

SEQ ID NO: 48 - DNA, 11523 bp, Artificial Sequence
  chemically treated genomic DNA (Homo sapiens)
tttgcgggagcggcggagagaagtatagtgttagcggtgttttcgtaagacggggtagtgggtttgaattagttacgggcggggggggtgtgcgttgaatttcgtattcggatttttagcggaggagaatttagttttataagtttttaggattttcggtaggaagacggtttaagtttttggatgtgattttgggataggtttttttatttttttttgattaaaatttttatttcgtttttttttaatttatttatgtcgtagttttttacggtttttgtcgtttttgtagcgaatttttggtaaattaagtataaaattcgttgtttgatcgatagagaaggttgtttattttttaaaaataaattgtagttttttcgtaggagtagcgcgggtaagcgaaatgaatttgttgggttaatttcgcgttgatttcgagttgtaaattaggggttcgcgtattaatttttattaattattcggagttagttaaatggtttggttttaaaaatgggaagagtaattatcgagtaatgttatttgtttggggttattcgatttgatattatgatatttaagggaaagttggtgagggggaaaataagggttttttttagttgggtttttagatggcgattttgcgttttttttttttttttttttatgggatttattttgcgtttaggggttcgattttgattattgttgtaggagttaatttttttattttttaggttggataattaattttttttagagtgtgtttgatattgtatttttttttttttttatggtagtgtttcggttttttgttttagtttttttttagggaaattttagtatttttttttttttttaaagtgagaaaaagagcgtggagttttagttggaaaatatagttttttataatttttgttattaaattgttttaaatttatattttataagtttttggaaagttgttgttgtttttggggaaaaggatttttcggttaaagatacgttattggtttcggaatttaaggatggggttttatttttttataagtttcggagtttgtggtttgaagtttagatataatggttaaggagagttgtttttatgggattttggtagggttattttagtagttttagatttttttggtttaggattgttttgggtttttaaattttataaaatttttaggagtaaattgggttaaatagtatttatttttttatttttgtattatttgattaaagtgtttttaaagatttaagtaggatttagtcgatgagtaggatttagggtatcgttatttttattttcgaaatatatacggacgtttatgtatatatattattatttttcgtttagaaaaaaaaaaaaagaaaaagaaaaaaaaaaagtttttttggggtaatagaggtatgagtttggagggtggtgtggtagagtgtaagggagggaaggagggggtaaattttaattttcggatagtataggtttaggtttaagttttatatattgtttagtattatatattggggatttgagaagttattagtttttattatatgatttcgagggtttttattttttttttgttaagtgggtaaagataattttcggtttcgttagtttttttgtatgggcgagtacgtttgggtttttatagatttttttttgaaatttgaggtttggttttttttgaggtttatagatgagtttataaacgaaatttggtttagggtatttattattgttcggagtgaaggtcgaatttttgaaaggatattaaaaagagagagagagaaagagagatagatatagagagagagagagagagggagggagagagagagagagagagagagagagagagagagacgaaatagaagttacgaagaagttttttttagacgaatttttttttatttttgagtttaggagtaggtagggatttagggtattgtataatttttagagttttgtttcgtaattgttcgtgttcggcgagggtcgtgggtttcgagtcgcggtatttattttcgagacgttcgttcgtattttagaattcgggtttaaggatgttcgtggttcgcgagtttttttaggtttttttttagatcggatacgtagatttcggcgggtaaagatcggttttaaatttttttttttaggttttttcgggaggggtagtggtgaaagcgtttgcggagcggagggaggttttttttaattagaagtttatcggatacgggtttgattagagcgcgttgtttttgggtttagcgtttggtttggcgcggagagtgcgggggtaggggttaggggaggtaaagttgtcggttggaaggagtagcgtgtttaaaggttttttgtataggttttggagggagagaatcgagtggttaaggtagcgttttttttacggttagtttcggttcgggaggggagcgtaattttgatcgtgcgttaagaggcgagacgcgttttgtgtttttttttttcgtcggcggttgtagagaagtcgggaatcgtttggtttggtcgggtcgtgagagttgaggggtgaaatggatagtaggtttagttaggaaggtgtttagaaggttgaaaacgatgattgtagttgtattgtgattggggaaaatttgttttttaataaaatatttttttttgtgtgatcggaagagggagtttttggttttcgggcgtcgtaggttttcgtatttgattttagggtggtttgatgattttaggtttaattatgttttagggttttgcgagtttgcggggttgcgggattagtggattagtaggtaatttttttttttttttttttttttcgagacggagtttcgttttgtcgtttaggttgtagtgtagtggcgcgattttagtttattttaattttagtttttcgggtttaaacgatttttgtgttttagtttttcgagtagttgggattataggcgttcgttattaagttcggttaatttttttttttgtatttttagtagagatagggttttatcgtgttggttaggttggttttaaatttttgattttaggtgatttaatcgtttcgagttatcgcgttcggtttaagtaagtttttttttttttttttttaagttttgtatttagtttggggttatttaagtttttattttatatttgtttttataaattcgttaatttttatatatggattaagagtttggtgtttttttcgtaggttagaagaaatttattttaacggtggggttaagatttttggaaaaggagtagaaatattttagtatggtttgggtttaaattttatttttgttatttaattttatagaatttggatttttttatttaaaataaggggtttttttaggattagttggtgagttttttgtaaaggttttcgaggttattgttttaattaatatttagaatttagtgtttgattaagtaggcgattgatgtttgttaaattaatgtttataagattaggatgtaagatataatatttaagaatttaaaatatgaatatgtttgtgaagttttgggcggttgtgagtgggtattaataattgtttttgtttgtgtattatggttagattgttttagggatttagagacggttttgattttttttttttggggtttggttttggcgttttgatggttatttttatatttttgagagttgatgtttttgttttttatagtttaagttttgggttaggttttgtatttttggggaagtagtaggaattttggaaatttaaagaataaatttagaatttcgagggttatttttgtttattttaggatagtagtcggagcgttttttatatttaagttgtttaatgagttttaagggttgggtaagatggatttatttgtttttattgtaagataaaatttaaatttggagatggtgtttttaggttatatgatttgaatttagggttttttttttattgggttttttttttagggtggagaagaaggatatatttatttattagttttggtttttttttaattttttttttatggtagttacgtttgtatattatagaagaatttagatattttttagaagtgtaatgtttgttggttgtaaaatttatagttttattttttacgatatgtgataagattttaggtattagatttgttttgaaaagggttggataagggatttaaacgaagcgatagaatttaggttttaaaaattttttagaagtattaaaaagataatggcgtagtagtattttgtgttttaggggtatggattcgatggttttttaatcgtttttaaatagtatatatgtagatagtgttttcggatttattgttttttagttatagatgtttagatgggttgtcgagttttatatttaaagttttaagagggtggtgggtagcgtttttgtatttatggagtataattttaagtcggatttaatttttaggttgtttattttagttgtttttttatagacggggatattgagatttagaaattttttaaaagtaatattagtttgttaaataaaggtggcgcgatttgattaaagaatataagttttagcgattagtaagttgttttaacgttttttgagtataaaatattaattttattaattaaaagtatagagtggaggtaatttttgggtttgtttgcggtttttttataggatagtgattttagattttttcgaagaaaagggcggtttcgatttttttaaggtttcgcgggggtcgggtgtttttggttaggttaaggtaggagcggtttgaagacgcgcgtttagaaggcgcgggtgaaggcgggtaataagggtagagtttttttttcgagttttgggcgaaggtattttttgtaaaagatatattttgttttttacgtattttaaaaatatttcggtttttaggttttcgagtaattttgttttaggaaaagtattcgttattgtattagtaaagcgtttattaaattatcgaattaaatcgaattggtttaggtttttaatagcgtggaaatttattgaaaataaatgaagagggtaaattataggggtttcgtaggttcgggttcgcgtcgtttaggcgaaagagaggtgggcgggtatcggcgcgggatgagaaattaatttgatatttatcgtgtgtcgagttttttttttgtattttgattaagtatagcgaataattttgtttttgttttaattttaggttttgaagaaatattgttttagttgagtttcgcgtttataagatgaagaggcgttttagatgcgttgaaagaaaggttaaagttcgtgtttttttttattgtttgcggtagaatttggtttcgtatagtttggattcggataagttaagtttttttttatttttagaatttgcgtggtcgtcgtttgagcgaagtttagtgaagatttatttttgtattattatacgcgggagttatttacggatacgacgttgttttagaaagttatttagttattggaggtgtatgtgtttattttagttttttacgatatttaatgtgtatttaagtgtgtgttaatatcgtattataagggttggaggtgtttttggatattttagcgttgcggaggtagtatagtataggcgtttattttcgcgttggttttatttcgaatttagagtttagacgtttgaaaagcgttacgtttggtgataatttggcgtttttttaattaataaaattttttttaaggtagagttagatattgcgtcggttttttggttttattttcgtggggattagtagtttcggaatttttcggattttaaggggttttagacgttttttcggtttttgcgaatagttaggtttttagttttgtttggttttggaggatgtcgggggttagtgtttgcgtgtatttttatttttcggttttttttttagtcgtcgttttcgttatttttacggtttttgggaagtagttgggtaagagttgcggttaaaaggggtaggagaggggggtgttttagagcggagagtttttggcgttattgtttcgcgcgtagggggcgtttttcggtttatttattttgattgcgaatagcgggttggttttcgaggtagttgggtaggtagggcgcgttaggaaatattttggtttggtcggatgacgtttggttgggcggaggaggatcgaagggttcgtagcgataggtttcggttgtgttagtgaattggtcggaaaagtggatagtgaaggcgtttaggtattgtttttcgtgcggtttcgcgtcgttttagttcggtttttgtttgatgaaggagtgaggcggcggcggcgggggtggcggcggagtcggtggcggcgcggggtcgtttaacgattcgtaagtcgaagcgttcgggggcgtaaagtttagtatcggcgtttattgcgtcgcgtcgtttataggtagggtatagtcgtcgtcgttatttagggaggggacggcgggtagtagcgcgtttaggtttcgtacgtcggagtttatttgttgcggtttagattcggacgtttcgcggttttttcggttttggagacgtttagcgttggtttcggcggcgtttaatttggtttagatgtcgttcgggtttcggattttttgttgttttggttgttgtaggtatttaggttcggagcggagcgtgtgttgagacgtcggtttcgggatatacgtggaagtcgggttttgtagtaagaggaagtttaggatcgcggcgaggagacggcggggttcgggcgtttgggttgtcgtttcggttttgggtgggtgggtgggtgaatgagtaggtgggagggagggcgggaagtgggggagcggataggcggtcgggttgcggagagttttcgggtgtgggcgttgttttgaattttttattttagttgtttggttgtttttagttttttaaagtttaaataagaggggtcggcggcgcggggaagaggaggagttaggaggttcggtcgttttatttatttagtagtttaagttcggttaggtagcgcgcgttgttttttgggggcgttttcgtagttggggtgagggcgggttcgagggagcgtttttttcggagatatttttttttttaatttaatacgcgtttttagttggtcggtgtggtataattttttttttattttttttttttggttttcgttagtgtgggagtttcgttttattggagagttcgtttaggtaagtagtgagttcgggtagggtcgaatgcggtgggagtagagatggggttgttaatttaaaagagtggtttggagggaggggtaggtaggttttaagagggcgggaattttaggaaagcgtagaaagaatttagttaagttttaaagaagcgtatatttttgttttgtatttttgagtttggtttttgtttttagaattgtcgggtaggggagtggttatgattttggggttattggggaaagaggtggttttttgtgggttttagaggtcgggattgaaagcgaacgttttttagttgggtggtcgggagttgtattagttataagtcgggcgtatttcgatcggttagtagttgtttatttggtgaggtttgcgttaggcggaaggcggttgtcgtttatttaaaattggagttagtagtatttagtttttttttttagtgaggaatatttaatttttttacggttaagtcgggaaaatagcggttagtttaggagggaagaaaatttttgggtaaacgtttaaagtttgcgtatatttcggtcggagtattttggcgtttagtttggggaggaggggtgaaggggagggtttggatacgaagttcggtagggagcgggtaatttttggagttatttcgtcgagtattgtttgtggttttggtcgaggatattattttggttgtttagtgattgattaggaggcggaagttagttaaggggattaaggagtggagtagggagaatttttatcggtttacgggcgcgagttagtgttcgaatttttgggagttcgaagagtttcgttaaatttgatttttttcgtttagtttttgtttggtagttttcgcgttttagagtaggtgtttggggcgggtagggggtgttttggtttggtttttggattttttaaaggagttagtatttattgggaaataatttttaggtaaggagaagaatcgggggtcggagcggagcgtgttttagaggtgcgtataaaattttaggggcgttaggaggtagtagcgacggcgtagcgtgggacggttaggcgcgacgggagggaagtaatcggttgtagttcggttttttgtatttggttggttcgggttggggttgtaagttttttagttaaatttatgtgaagtaaagtagttgtagtttgataaagaatggcgttttaataaatgatatagtaattttttacgttttggtttttagtttgtattgtataaacgttgtcgttattaaattttggttgcggattcgaagtgtgtgcgggtttaggatttattcgaagggcgtattttttgggaatgcgtatttcgtaggcgtaggagattttgagggtaaagatgcggtatttgagtttttcgtttgttttttaggttatttttgttgtttgattttgcgtcgtttttatttagaagtttttaaaattattattaagaaaagaaagattttataagatattgtttttacgttttttgtttagtttttttttatacgatttatttttaaatttttcgcggggttcgcgcgtttggttttttgagtggagaaaggattttcgagataaaatttattgttagttgttttaagaattttttagatttttgtatttttttttttttttttcgtttattatttttatttggaagtcgttttttttaattaggatttaattgtgaggggcgaggagttttttatgaaaagtcggggatttttatttttaaacgaaaagattgagattgtttttttttttattatttttggtatttttagcggggggagaggaggttatttgaagggaggttggtttgaatgtgagtcgttgtgtttgtgaaatttaggtaaggtaaagatacgtaaatttttgttaatattttttaaaaataagtttttgtttcggggtgagggatgtaggggtggataggaggaaaggagagttaagtaaatgtagaattttttttttttttgttatttatttttttagaatttttgtgggggcggggaggggaagagtatcggtgcgaatttcggggtgttttttcgttcgatttggattttttcgattaaagaggtgggaggagttttttgtagtttgcggggttaagaagaaagtgttaagttgaggagtcgtagtcggaggattttagggattcgataggaagttttcgtacgattttaacggatttatatgttcggaagtttaggcgatattaagttagcgttggggaattgacgtatttttgtagtcgtagggcgttttatgtttttttgtttttttttttgttgtgggtaacgttttttgcgggagatttgaggttttttaagggggatatgttagttatattggttttggcgttttgagttaagtattaggatttatagtttagtacgaaggtaggtagtatttttattcgtcgcggacgataggcgtttttttgtattttttttagttcgcgaggttcgtttttcgcgaggttttagagaaaagtaggttgtggaaaattgggcgttttttttttttatttatttttttatttttgttagcgtcgagatttgtagtagaggtttttggtttgaattatcgattggtaaagaaagttgtagattaaatttttcgttttatagagaaggaaattgaggtttagatagtcgaaggagaggtagtttatggagcgtagcggtaaagagtaaggggttggtggttttagaatggaattttagttttgttaggtaattaatagttgtgtgattttagacgagtttcgtagtttttttgagttttagtttttttattggttaaacgggataatgggatattagcgtttattttatagagttgttttgaggattagataggagagtagtgtgggtttttgatttaattaattttatagtttttgttattattattgtttaaggataggaaataagttagtggtaacgtcgagttgaaattcgggttttttaacgtttagttggaggttttatttattatttttttatttttttagagttaatgggatgtagaggcgaggatagtttttggaaaattatgtggcgttgatatattggtaaagcgtaggtatttcggtttcgaaggtgtataattattgtaatatgaaaaaatcgaggttgggtaggagtagggtagtgaggattttttaatttttatttttatttcggcgttgtttattgtatttgatagagcgcggagttgggttgttatagtcgtaattttagggattagtgcgtacgtttgggtcgtttttcgggagttatttagcggtcgcggataattgaataaatattttaaagcgttgcggtcggttaagggcggggatagttatattgcgcgcggggttcgtaggtcgtaataaagagtggttcgatttcgttgttgtttgtcgcgggagaggaataagttttcgattagcgttttttttcggggttcgcgtttcgagttttacgcgtaagatagtttaatagttgtttttttttttttcgtcgattttaatttttcggaatttgtttattcggggttgtagggtaagtgtttaggatggtttttagtttcgcgttggcggtgaaaattttaacgttatttttttaattaaaaaaaggggggggtaagggaggggttttgtgataattatttttagttttttttgattattttaaaattaagtcgattttttttaattagtttttatttattgttttaatttttttcgttgattttatttgggagttcggaatcgttaggtattgtcgaatgcggtgtaaaattttttttttttttttagttcgtagtgtttggagtcgttggggttattcgtttgttttgatgttatcgcgagatggttttcgagtttttcgagagtttttagtgaaaggatttcgcggtattgtttttattattatatcgtaaatttttttaaattttggaattaattatatagaggatatgttttaatttgttttgtattaatgttatagtggggatggaggttaggtcgtggttagagtagatacgtaggtttatgaaattgatgaattgagagttgtttttagttttgagcgtattatttggaattttagtttgaggttataattagaatttttgattttagatttaattttgtaaataataggggaaaaaaatggggaaaagaaaaattacgagagagggaaaaaaaattattttgtatttgtaaaaaaaaaaaaaaaaaaaaaaaaaaaaaaaaagttatataattttaaaattttttcgttttagataat

SEQ ID NO: 49 - DNA, 6050 bp, Artificial Sequence
  chemically treated genomic DNA (Homo sapiens)
tatttttttttgttaaaaagttaagagttgtttagaaggaaaaaatagttttttttaaagaggttaaatttttagtattaattagttgtagtagtggtatgtgtgtgtgtgtggggggggggtggtatggtaattttgtgtttttagtgttttaaataggggtaatttttttgtttacggtttgagttatcgaatgagtaatttcgattttttaagattttttattgggtttacgtgtgtgtgagttttataggaattgtggaatgttttttttttttgttgggtttagatatttagaatgaataaattaaagggtagtggtaatatggttattgttattgtagataatgtggtatttatatatgggtattagttgttttttttatggggtttaggaataagggtaagtttgattttttattatgaattattggggtgttttttatatatagaggttgtattagttgaaaatagtttaaatattttgtaattttgttttttttaatttttgtttatttatattttagaataaaagagtttgtttagtttttttaaagatttaaagaatattatttatttgttttttaagtatttaaaaagtataatcgtttatatttattttggttggatgaggatatgtatttatttatttatttaagagatatttattgttagatttggtggtttacgtttgtaatttcggtattttgggaggtagaggtgggaggattatttgaggttaggagtttaaggttagtttgggtaatatagcgagattttatttttataaaaaataaaaaattagttgggtatggtggtatgtgtttgtggttttagttatttgggaggttgaggtaggggtattgagtttaggagtttaaggttgtagtgagttataattatattattgtattttagtttgggtaatagagtgagattttgttttaaaaaaaagaaagaaaaagaaaaagaaaaggggtatttattgaatatttattatgttttaggtattgtgttagattttaagtgaatattagtatatgaataagataaaggcgaaaagttattaaataagtttaagttgatttcggtatatgtatttttttgatttttggtttcgtgttttgattataattttttattattagattagatttttttaaataaataattatttttgtatgttggggatgggttgtgtgcggtagtatttacgtaggcggtatagatagtagttttttatttaatgttgtaataatattaggttaaataatgtgtattgattttaaaagtgtggggttaggttttttttaagtgttatagggagagtgtaaagtaggaaaagtttatcggatgaggaaatattgtagagggaaagtgaatttttttttaatttgggttaaaatttagatgtggaattttatttttttttttatttttggatttttagataggaggaatttagtatatagataattatgaattatatatattttggttttatatgtttagatttgtttagagtatgaaatttttgttttgttggaaggtagcgtcgtgtttacggaggtatataagtatttgttttaaagttattttgatttgtagatttgtaaatggtaaaaataattttatatgtttgttttgatttgtttttatttttaggttattttgtgtgagttttattttttagaatgtgattttgtagttttgaaatggatattatgagtagattgagatgtgagaatatgttagaatgattataggttcggatgttagtggggtaggagagggagtttgagattgtattggtttatattgtggtttttggttgagtatttggtttgtttggatgatgttttggttttatttaatttttattattttattatttagaggatagaggatttgagttttatttttgtattgtagttattttttttgggatttgtttttaagtttttttttgtgttgtttggtattttttttttattttttttaaattatttattgttattttgtaagttcgattgatttgttggtttttttatgagattggaatttttttgagggtcgggataggtttattttttttattatagtgagtattagtttttagtttagttaatagttttgttaaataaataattgaataaaattatttgttaaataatggtttgttttttttagaggatggatttagtttgttttttttagaggatggatttagtaagtttttaattttggttataatggtgttagaaggaaagagttaagttatttggaggaaataggtttatttaaagatttttttttttttttttttttttaattggtaaaggtaggataagtgtatttgagataaattttggatataaaattttgatatattttttaggtattggtcgagatgttttggatttgaaagggaagtaaattaaattattttaggtttttttttttttttttttggagatagaattttgttttgttgtttaggttggagtgcggtggtacgatttcggtttataggaatttttgtttttcgggtttaagtaatttttttgttttagttttttgagtagttgggattataggcgtgcgttattatattcggttgttttgtatttttagtagggatagagttttattatgatggttaagttggtttcgaatttttggttttaagtgatttattcgtttcgggtttttaaagtgtaggaattataggagtgagttatcgtatttagttaggttttttgttaagtggtttgagatttagttgtgaatggtagttatggttagatttaggaatttaaagtttgatttattttgtttgaagttaatattaataataagagagatgtatttggttttataatttttttttttttcgtttttttttttttttttgtaattaaggatagaattagaagtatcgaaggtcgtagaattgttttaggatttagagtagttttaaggaatttgtgtttacgtattatgtgtgttttttcgtttttttttttttttatgagtgagaaaaaaaagcgtttaaatttttattaatataaattaatgatatataatgatgaaattttgtttttatttttgtttgtgatagggaatgtaaaaatagtaagtggtttagttttacgaattttcgttttttgtttttttcgtttttgtcgggttggatttttaagaatggaggttagcgtatagtttcgcgcgggtcgtttagttttcggattcggcggatgatgttaggcgacgggagcggtcgcggtcgggtcggggaggtcgcggtttaggggagttgggagggagggtggtttcgttaggtcgacggcgcgttcggtcgcgcggcgttgtttggagacggttttggcggcgttgtgttgttgtaaatagtcgtttttttgttattatttatagtaggattttttggttttcgggcgcggcggttggaggtaggtttgcggttcggtttttcgcgcgtttcgaattattcgttcgtcggttttattttgtttcgtttttttttaggtgtttatcgcgggtttcgattttcgggttcgaagagtggagaagggaagatcggggttgtgcggggatatgcgttttcgcgttttggaggtggttagcgcgttggggttgagtttcggtagcgtgatttcggttgttttacgtagtagggtaggagattggggggcgtggtatattttggagtattttgtttttttaaagtttcgtgttttaggacgtggagtcgtttttggggttttagtagtcgaggtatttcgtttaggcgtagttggatattgtttttttagttttcgttttttattttttaagttcgcgttggaaaattattcgttgcgggttttcgtaagtatagttttttggcgggatcgaattagtttttagcgtagatttgagtttttcgtaggaagtatatttcgttttgttatttcgaattgattattttgtttatataattatatttcgtattttttatttttggggtttagtttagaatcgggtagatattttttttaaatgttttcgtacgtaggttttgtatagtgtttatttgttggtgttttagggatttgatagtttttttaatatttttatatatggtcgagaaaaataaataaataaatgcgttgttttttttaaaaaaataaataaataaagtatttagtatcgtaaagtaggttatcgtatttttttattttggattttttattttttgtttttaaacgtaggaatagtgttagtattgttcgagttcgagggttggaggttaggggatgaaggtttgtttttacgttttgtattgaattagggttagaattggggatgggggtaggggcgtattttttcgggagtcgaggtttaagttttcggggttttgtattcgatgtcgttttttttatttttgagttttagaattgtttttagttttcgtataagggtaaaaaggcgttttttgttttatttttttcgatttcgggaataagggttcgtattgaattaggtgcgaatgtttttttttattttgcgtcgttttcgtttttttttttttagtcgcggttttcgttttttttcgtattgtattttcggtgttggttgtagttcgcgagtagttttcgttaatttttttttttttatataggatgtttatattaggatatttgcgttagtaggtttttacggtttttttttgtagttttggggggagttattttcgaaattttttattttggggggtttacgagatttttgagataggaattgcgaaatgtttacgagattaggatacgcgttaaggcgggggtagggagttgcgagcgttggggacgtagtcgggcggtcgtagaagcgtttaggttcgcgcgttatttttttggcgttatcgtggttgagttcgtgacgtttatatttatttataaaacgtttgttataaaagtagtggttgcggcgtttcgtattttaatcgtatttgtagcgagtatttgagaagttaagattgagtcggcggtcgcggcgtagcgaacgagtagtgatcgtgtttttatttagttttgttttatagcgtttatttgttttcgtttttcggtttttcgttcggttttgtttaatcgttacgatgatgttttcgggttttaacgtagattacgaggcgttattttttcgttgtagtagcgcgttttcggtcggggatagttttttttattattatttattcgtagattttttttttagtatgggttcgtttgttaacgcgtaggtaaggttggtttttcgtcgtcgcggggtcgggggtttggggtcgcggaggaggagatatcgggcgggacgttttagtagatgagtagggggtttttttgtgtttggagggaggttgtcgtggtcggagcggtgtcggttcgggggttcgggatttgttttgagcgtacgtacgtttgttatagtaagaattggtttttttttcgggaggtaggttcgttttgagtaatttttggtttgtattttaggacggatttttgatattagttggagtagacgtgttttaagtataaattcgttaattagagtttggttttttcggggaggtggtagaaagcggtaattttttttttttcggtagtttggagtacggaggagggatgagggaggagggtgtagcgggcgggtgtgtaaggtagttttattgataaaaagcgagtttattttggagatttcggagcggcgtttgcgttagcgtagacgttagggatatttataataaatttttttttaagtaagtgatgttgaagggataacgggaacgtagcggtaggatggaagagataggtattgcgttgcggaatgtttgggaggaaaagggggagattttttatttaggatgagggatatttaagatgaaatgttcgtggtaggatcgtttttttttattgttgtatgcggtattgggaattcgttttatttgtgttcggaatttgttcgtttacgtcggttttttttttttgttttgttttagg

SEQ ID NO: 50 - DNA, 6050 bp, Artificial Sequence
  chemically treated genomic DNA (Homo sapiens)
tttagaataaaatagaaggggaaagtcgacgtgagcgagtaggtttcggatataggtggggcgagtttttagtgtcgtatgtagtagtgaagagaaacgattttgttacggatattttattttaaatgttttttattttggatgaaaggttttttttttttttttttaggtatttcgtagcgtagtgtttgttttttttattttgtcgttgcgttttcgttatttttttagtattatttgtttgaaagggggtttgttataaatatttttgacgtttgcgttgacgtaggcgtcgtttcggagtttttagaatgaattcgttttttattaatgaaattgttttatatattcgttcgttgtattttttttttttatttttttttcgtgttttaggttgtcgggggaggggggattgtcgttttttgttattttttcggagaagttaggttttagttagcgagtttgtgtttgggatacgtttgttttagttaatgttagagattcgttttggagtgtagattagaggttgtttagaacgaatttgtttttcgaagggggaattaatttttattatggtaagcgtgcgtgcgtttagagtaagtttcgagttttcgagtcggtatcgtttcggttacggtagtttttttttaggtataagggagttttttatttatttattggagcgtttcgttcggtgttttttttttcgcgattttaagttttcggtttcgcggcgacgggaagttagttttatttgcgcgttgataggcgagtttatgttggagaaggagtttgcgggtgagtggtagtaagagaggttattttcggtcggggacgcgttgttgtagcgggaggatgacgtttcgtagtttgcgttgaagttcgagaatattatcgtggcggttaggtaaagtcgggcgaggggtcgaggggcggagataggtgggcgttgtggagtagagttgggtaggagtacggttattgttcgttcgttgcgtcgcggtcgtcggtttagttttggttttttagatgttcgttgtagatgcggttggagtacgaggcgtcgtagttattgtttttataataagcgttttatgaatgagtgtaaacgttacgggtttaattacggtggcgttagaggggtggcgcgcgggtttgggcgtttttgcggtcgttcggttgcgtttttagcgttcgtagttttttgttttcgttttggcgcgtgttttaatttcgtgagtatttcgtagtttttgttttagaggtttcgtgggttttttaagatgaggggtttcggggatggttttttttagggttatagggaaaggtcgtggaaatttgttgacgtagatgttttaatatggatattttgtgtaaggggggagggattgacgggaattgttcgcgggttgtagttaatatcgagggtgtagtgcggggggaggcgggggtcgcggttgggggaggggaggcgggaacggcgtagaatgagagagaatattcgtatttggtttaatgcggatttttgttttcgaggtcgggggggatggggtagagagcgtttttttatttttgtacggaaattgaagatagttttgaggtttagagataggagaaacggtatcgagtataggatttcgaggatttaagtttcggttttcgaaggaatgcgtttttatttttatttttaattttagttttaatttagtgtaaagcgtggaagtagatttttattttttaatttttagttttcgggttcgagtaatattagtattgtttttgcgtttggaagtagaaagtggaggatttaaaataagagaatacgataatttattttacgatattgggtattttatttatttatttttttaaagaagatagcgtatttatttatttatttttttcggttatgtgtgggaatattaaggaaattgttaaatttttgagatattagtagataaatattgtgtaaaatttacgtgcgaagatatttgaagggggtgtttgttcggttttgagttgggttttaggggtagggagtgcgaggtgtggttatgtgggtagggtggttagttcgggatgataaggcggggtgtgttttttgcggggaatttaaatttgcgttgagggttggttcggtttcgttaggaagttgtgtttacgggagttcgtagcgggtgattttttagcgcggatttggagggtggaggacgggggttggaaggatagtgtttagttgcgtttgggcggaatatttcgattgttgggattttaggagcggttttacgttttggaatacggggttttggggaggtaaggtgttttagagtgtgttacgttttttaattttttgttttgttgcgtaggatagtcggggttacgttgtcggggtttagttttagcgcgttggttatttttagggcgcgaagacgtatgttttcgtatagtttcggtttttttttttttatttttcgggttcgggggtcggggttcgcggtgggtatttggagaggggcgaggtaggatgaggtcggcgggcggatagttcggggcgcgcggggagtcggatcgtagatttgtttttagtcgtcgcgttcgggagttaggagattttgttatagatagtaatagggaagcggttgtttatagtaatatagcgtcgttagggtcgtttttaggtaacgtcgcgcggtcgggcgcgtcgtcggtttggcgaggttatttttttttttagtttttttgggtcgcggttttttcggttcggtcgcggtcgttttcgtcgtttgatattattcgtcgggttcgggggttgagcggttcgcgcgaggttgtgcgttaatttttatttttagagatttaattcggtaggagcggggagggtaggaggcggggattcgtggaattgggttatttgttatttttgtattttttgttataggtagaggtgaaaatagaattttattattgtatgttattggtttatgttggtgggaatttaggcgttttttttttttatttataaaaagggagggaaacggaaaaatatatataatacgtaaatatagattttttggagttgttttgaattttaaagtaattttgcggttttcggtatttttaattttatttttgattatagaaagaaagagggggacgggagggaaaggggttatgaagttaaatatattttttttattattaatattagttttagataaaataggttaagttttgaatttttgagtttggttatgattgttatttataattagattttaggttatttaataggaaatttgattgggtgcggtggtttatttttgtaatttttgtattttgggagttcgaggcgggtggattatttgaggttaggagttcgagattagtttggttattatggtgaaattttgtttttgttaaaaatataaaatagtcgggtgtggtggcgtacgtttgtagttttagttatttaggaggttgaggtaggagaattgtttgaattcgggaggtagaggtttttgtgagtcgagatcgtgttatcgtattttagtttgggtaatagagtaagattttgtttttaaaagaaaagaaaagaaaatttagaatgatttgatttattttttttttaggtttaaagtatttcggttaatatttaaaagatgtgttaagattttatatttaggatttattttaaatatatttattttgtttttgttaattaaaaaaaaaaaaaagaagaagggtttttgagtgagtttattttttttagatagtttaattttttttttttggtattattatgattagagttggagatttattaaatttattttttggaaaggataaattaagtttattttttggaaaggataaattattatttaataaataattttgtttaattatttatttaataaaattattgattgggttggaggttggtgtttattgtaatgaagagggtaggtttgtttcgatttttagagagattttagttttataggaagattaataagttaatcgagtttatagggtagtagtaagtggtttgaaagaggtaagaaaggggtgttaggtaatatagaagaaggtttggaaataggttttagaggaggtgattgtaatatagagatggggtttagattttttgttttttggataatggaatgataaagattgagtaaggttagagtattatttaggtaaattaagtgtttaattagaagttatagtataggttaatataattttagatttttttttttgttttattaatattcgaatttgtgattattttaatatatttttatattttaatttgtttatggtatttattttaggattgtaaaattatattttaaaaagtggagtttatataaggtagtttaaaaatgaagataaattagaataaatatgtgaaattatttttgttatttgtagatttgtaggttagggtgattttgagataggtgtttgtgtgttttcgtgagtacggcgttgttttttaatagggtagggattttatgttttggataagtttgagtatataaaattaaaatgtgtgtagtttatgattatttatgtgttgagttttttttatttggggatttaaaagtgaaaaggagggtagaattttatatttgaattttaatttaaattgaaaaaaaatttattttttttttatagtgtttttttattcgatagattttttttattttgtattttttttgtggtatttgaaggagatttgattttatatttttgaagttagtgtatattgtttagtttggtgttattgtaatattaagtgaaaggttgttgtttgtatcgtttacgtaaatgttgtcgtatatagtttatttttagtatgtagaagtagttgtttatttggggaagtttggtttagtggtgaagggttgtggttaaagtacgggattagaagttaggaagatgtatatatcgaaattaatttagatttgtttggtaatttttcgtttttgttttgtttatgtgttgatatttatttaggatttagtatagtgtttgaaatatagtaggtgtttaataaatatttttttttttttttttttttttttttttttttgagatagggttttattttgttatttaggttggagtgtagtggtgtgattatagtttattgtagttttgaatttttaggtttaatgtttttattttagttttttaagtagttaggattataggtatatattattatgtttagttaattttttattttttgtagagatggggtttcgttatgttgtttaggttagttttaagtttttggttttaagtgatttttttatttttgttttttaaagtgtcgagattataggcgtgagttattaggtttggtaataaatattttttgaatggatgaatgaatgtatgtttttatttagttaaggtgaatgtagacggttgtgttttttgggtatttagaaagtaaatagataatgttttttaaatttttggaaaggttgaataggtttttttattttgggatatgaataggtaaaaattgggaaagataaaattataagatgtttgggttatttttagttggtatagtttttgtgtataaagaatattttagtggtttatgatgaaagattaaatttatttttgtttttgagttttatgagaaagatagttagtgtttatatataaatattatattgtttgtaatgataatgattatgttattattattttttaatttatttattttaaatgtttggatttaataagagaaagaggtattttataatttttgtgggatttatatatacgtgagtttagtgaagggttttaggaggtcgaggttatttattcgatggtttagatcgtgagtaaaaagattgtttttatttagaatattggaggtataagattattatgttattttttttttatatatatatatatgttattattgtaattaattagtattagagatttagtttttttgagaaaaattgttttttttttttgaataatttttggttttttgataggagaggatg

SEQ ID NO: 51 - DNA, 14147 bp, Artificial Sequence
  chemically treated genomic DNA (Homo sapiens)
gggggtattgagtaatatatttagattaataatattttataagtgtgagtattattgatttaaatttttttgttggttgtgttttgtgtttatgtttgttttatatttattttttttagagttgttttttttagagttttagtaatttttatttttttaaatttttttagttatgggaaggattagtaggtgttagtggatttaaaagaattttagatttgttgagatttttgatttttggtgtttagattaattagtaaatagtttaattaaacggtttgtttttatggttaatataattttgaattggtggttatttagattaagtttattttgtttttgagacggaattttgtttttgtcgtttaggttggagtgtagtggtgcgattttggtttattgtaatttttgttttttgggtttaagggatttttttgttttagttttttaagtagttgggattataggtatttattattattttcgattaatttttgtatttttagtagagatagggttttgttatgttggttaggttggttttaaatttcgattttagatgatttgtttattttagtttttttaagtgttgggattgtaggtgtgagttatcgcgtttagttaaagtttagtttgtataagaaggttttttttgttatgttataggatttttgagtttattaaatagattttaatgttttgagattttacgtatttttttaaaatgaagtatttaaattgttagtgtttgtttttttgtttggtttttttgatgtattgatttggtttgttagtgtgatgaaaaatatggttgagttttattgttttattgtaattagtaggattgtttagaagtttaatttttttaagagatgaagatttgagtttatgtagttggttgttttttaaaaatatttggttatttgggatatattttgaattaattttttggttattttatgtgattaaaagtgttagttttttttgtttttagtatatttttttgtttgggaagtggaagggatgaaatttttatatttttttttgatgatatagaaaggagtatatatttatattttatgaatagatatgtaattatagaagaaatagtttaacggtcgggcgcggtggtttatatttgtaattttagtattttgggaggtcgaggtgggtggattacgaggttaggagtttaagattagtttgtttaagatagtgaaatttcgtttttattaaaaatataaaaaattagtcgggaacggtggtaggcgtttgtaattttagttatttaggaggttgaggtaggagaatcgtttgaattcggagggtggaggttgtagtgagtcgagattacgttattgtattttagtttgggcgatatagtgagattttattttaaaaaaaaaaaaaaaagtataattatatgattatttatattgttttatatattaaattagtagtaatttgttttttatatagtaaataaaaataaattagtagtaataaatatattttttttgtgttatagttagtatttggtgaattttgtattttttttttttttaaagtgttgaatttataggtttttataaggtaagtttatattattaattaattttgtttttttttttgatgttaaaattgttttttaggagttgattaggtttatttttttgttttttaagtattatttttagaatatttttgaaagtatttttgttttttggtaataatatttatattttatttattttttgtttttaaatatatatttagttaattttaggttttttttaatggagtagttatttatttatttaatatacgttgggtgttttttttgtgttatatattgttttggtttttggggatagagtaggaaataaaaaaaaataaaatttgtttttatatagttgatattttagttaggggagataaataataaataaatgaatgatgtagtatgttagatgttgatagtgttatggagaaagtatattatggagattagaagtattatttgtaatggaatagttatgattttaagaagaatggttgattggatgtgaagtgtgagagagaggagtttaggtttttggttgagtaattggagggatggagttgttattatttgagatggagaagttaggggaggagtagatttggaggggaaggttaggaatttagtttggaatttgttaagtatgaggtatttattaaatattgaagtggatttttagaagatgttattaaaattagttaagtttaggagagagttttgggttagaaataaaaatgtgggagatattggtatatatatgggtttatattatttttttttttaatttaatattttattttattgttttttgtttttttaatagtatttagttttatttattttttaaattgatttttatattgatagtataataaaatttatattttttattatattaagattttgtgtgatttaatttttttttattttttggattttgttttaggttattttttttttttatttaatttttaatattttgattttattgttttttaaatagttttttgttgttttttgttttttttgtggaaaaggtttttttattgtttaattattaggtatttttcgatttttttttattttttatttttgagaaaggttttttttgattttttatattaattaggatttttttgggcgagatttgatttaaattggtttagagaaaaggagttaattgattggtttatgtaatttaattttttttttttgttgtaatttttttttggtttttattttatttaaggttaaagttagggtttttattatggttttgtaggttttatatagtttgttttttttattatttttttgattttattttttatattttttttttatttatttttttttagttagagtggtttttttgttgtattttaaatatgttaggtatatttttattttagtgtttttgtgtttgttgttttttgtgtgtggaatatattttttatatagttatattatttaaaatttattgtttttaagtttttatttaaatgttttttcgtgaagttatttttgagttttttttaaaattgtagttttttatttttgtattttttattgttttttatttttaatttttgttattgtagttagaattatttgatatatagtttttattttattggttttttgttatgtttttttttataagaatttgaagtttattaggtcgggagttttgtttgttgtgtttgttgttattttttagtgtttaaaattgtttggtatatagtaggtatttaataatttttgaattagtgaaaattagatggtggtttggtatttttatataggaatgagttaggtggaaattatttaggatataagtagattttgaagtgataaggaagggttattataattatgtggggtttattttgtttttttttgttttttttttttaggtttagtaatagttttattaaggattttatgaatattaaagtttatatttatatgttgttagaggtgagagtagtttattttattattagattttgtgtttagggtggtgatttgaagaaggaagagagcgaaagaagggaaggattatttttttttttaaattggagttaagggagggaggttagagtaagtttgggggcgtaatttagatttagtttttgtttaattttttttgtttttttttttaggggtttagagaattataaggtttgtagaattttttagagaagttttattattgattttttttttttatttttagatattaaagagtttgaatgtttttgagttatatggtttttttttttttttataaattttgttagttgttacgggggtttgtttttagggtataaagttattgagagatttagagatttagtttttttgtggaatttttaaaatgttttagtagttttgtttttagtttgttgtttggtagtatttgttagttgattttatgtattgtttttttttttgttattttggtaatttgggttttttattttatttttttttttatttttttttttagacgttattttttgaattgttatagagaatgggttaatttatggtggaggtttgtttatttttataataattaaagggttttaaggtttacgtttttatatatttaattattttttaggtattttaaattatatttaaattttaatttagttttattttgttttagtttttgtttgtaagtgttttagtttttaatgggtatagatttggatttcgttttttttagtcgggtttttattttaggttgagtttagttatcgttaattaatgtagagttaggttttttttttttttaattttggtcgtagtttaattttgttttttgaaagtatttcgtttttgttatttaatgttttttcgtgtgtttgatagttattttgtttttttattttcgttgtgttttaaattcgtttttatttagttttatggttttgtttaatcgtagagttgttttgttcgtttacgcggagtttagttcgatttattttcgtcggttgttacgtttatttttatataagttttgttttcgttgagtagtatggcgtgcgatatcgtttttttggtgttttggtaggggtttagaagtttttcgttcgttaattagagaaaaatagggttatttattttcgtttttgggggttgttttttattaattttatgtaagttaattagtgtgaggtagattttcgttttttcgatataggtttcgagtttttttagttgtttatagttcgttagtttttgagttaatcggcgtggagtatcgtgaaggtcgaacgcgttttttcgggattttaggggtcgtgagcgttttattatttttttttacgttaattacggtatagttttgtagggaagggttcgttttttaatttttcgaggttttgcggtcgattaatagcgttttggttaattagcgagcggcgggatattgggtttttttttttcgggtttacgtgagttgtagggaaacgtaggggcggtttttaggtgttgtcgtcgttatcgttattattatttttatcgtcgtttcggaatttaggtttggggggcggtggggtcgcgtatggagttttcgtttttcggagttgttaatattgttaacgttatcgttacgttatatataggtgagttttgggtttggagggtggagggtttagttcgtgattttacgtatttttttcgttttcgcgtagaggatgtggtttggtcggtggtttgttggtgttcgatttttcgtcgttattattacggttggtggatttgcgtgtggtattgtttaagtttttcgttttttatagtggatttgatcgtggtttaatttttttttttcgttgtataatggatcggtttgcgtgtttatgtttttttttacgttaatttagggtggattcgtttataggttttttttttatttttatttttattcgttttttatttatttttatttatagggagttagtttgtgatagtgtttagtttttttaatagtaggtgtatttgagtgtttggattttttttagttttaatttttaggagattcgttcgtggttttatttattttattttttttgtatatcgtagcgaattaattcgtggcgtcgtattttttcgtatttttttttaatagtgagtttatttgagtttgtatttttgttttttttagttttttaatgtattagtttatggttttttttaaaattattttttttttttattattattattattattttatagtggattagtttttatgtttggatttacgtttttttagttattagtttattgttttgttttttttttttcgtagattgtcgttttagcgtttggggtttttttttttttaatagtgggttagtttagtgttttatatttttttatttttagtagtttagtttatagttttttttttttttgttttgaattagtttgtgtgatggtttttttttttttttattgtggtgtaggagtttgtaaggttttttgttttttttttttttagacgatgagttttattatttttttttttgtagtggatttgtttattggttttttttttttatatttttgtatgtttgtatagtttttcgtatattttttcgtgagtttagtgttttgtaattgggggaagatcggtcgtgtatttttaatttttttttttttttttttttttttttagaagagaacgtgttgatttttttttttttgtgatggagtattgtacggttttttttgttttttattttttaatagtgggttagtttggttatattcgtaattataaagacgttttgttttattataataagtgaatatattagcgttagtgatgatagtaatgttaataggagttagcgtttattgagtatttgtcgtatattaggtagagtgttttatatgaatgagtttttttaatttttattataattttatgagataggtagtgagggaattgggttatagggaggttaaattttttatttaaaggtggtttaggaagtatttaggatataggataatttttgaggttttttttttagattttattttattttacgtgaggttttagtttttaaaaattaaattagtttttatttttaagtttttgtttttgttgttttttttgtttgtagagtagtttttattttttatttttttttagtatttatttattttttaattttagtagttgtgtgattttagatgagtgatttaattattttttttttgtgtttttttttttatttgtgaaatgggggattagaattagaattttttttagtgtaaataaatattaattgtgaattaatggtaaaataagtaatttttttagtattatcgtttatatttttttatttttttattgtgttttaattatattggttttattatatagttttttaaatatagtaggtatgggttagttttagggtttttgtattggttgttttttgtgttttgaatattatttttagatttttgtatggttttttttagtattttgtttaaatattaatttttaaaggatgtttattatattgtggtgtgtggaatgtagtataaaaagatatatgtatgaaagatgtttttaagaatgttagtttatatatgagtaagggttttttttttttttaaaaggatgtgtttataagattgaggtacgtaatatgttttgtaaaggtataggtataaaagttgtttttaagagtgttagttgtatatgtgaataaggattgtgttgttgtattgaaagaatgtgtttataaaattgtggtgtgtagttgggtataggggtgtgtatttatagttttagttattcgggaggttgaggtgggaggatagtttgagtttaggagttttaggttagtttgggtaatatagcgagatttttttttttgaaaaaaaaaaatttaaaaaataattattgtggtgtgtgtaatatatttttttaaaggtataggcgtaaaagatgtttttaagagtgatttgattttgttgtatttgggtagtgttattttattaaaggttgattgttatattatggtatttagaatatattatataaaggtatatgtataaaaaagaagtttttaataatgttatttgtaaaaataaaaaaagttaatttttttttgattatttgaagttgtatatttagtagggtttaagttaggtttttgatttgtttcgttgttttttattattgtttgatatattgtgtgggttatttgtttgttgtttgtttttttttattagaatgtgagttttatgaggatttagtttttgtttgtttatttatcgttatgtttttagtaattgaaaatgtattaggtaaatagtagatgtttaataagaatttattttatgaataaatgggaaaaagataatttgagatattagtgtaggggttatatgaggaagaagaagggatatgagagttaattagttgggattgtttttgtaattaatttttattgagttttttgtgagtattaggtatttttttaggtgttggaatatggtaaggaacgaaatagggcgaaatatttgtgtttgtggagttgatatttattaaaagttggggaggttgggtacggtggttaatattagtaattttagtattttgggaggttgaggtgggtggattgtttgagtttaggagtttaagattagtttgggtattacggtgaaattttatttttattaaaatataaaaaaattagttgggtgtggcggcgtgcgtttgtaattttagttatttgggaggttgaggtaggagaattgtttgaatttaggaggcggaggttgtagtgagttaagattgtattatgtattttagtatgggtgatagagcgagattttgttttaaaaaaaaaaaaaaaaaaatttaagttggggagatagattatgtgaataaaataaataagtaaaattagtataatagataaatgttgagaagaaataatgaaatagggtaggtaggaatcgagtattgggggtggttgaaattttaggtatagggaaggtgatttttgaattagggttttacggtagagacggagagagttttaatgtttacgggaagagtatattaggtagaaggaagtgttagtttagaggttttgaggtgggatggtgtttgttatgtttaaggaatattaaggcggttagtgtggttggagtagagtgcggggaagggtagaaggtgaggttatataggtgatgggagttagatagtgtaggtgatatataggataggattgtaggggtagggggagaaggatgatatattagttaatagttaatatttgtggagtatttgttatatattagaggtatttttttgtttaaatattaatttttaaaggatgtttattatacggtggtgtttggaatgtattataaaaagatatatgtgttaaagatatttttaagaatgttagtttatatatgaataaggattttttttttttttaaaaggatatgtttataaaattgaggtatgtaatatgttttatggaggtataggtataaaagttgtttttaagagtgttagttgtatatgtgaataaggattgtgttgttgtattgaaagaatgtgtttataaaattgtggtgtatagttgggtatagaggttgaggtgggaggattatttgagtttaggagttttaggttagtttgtgtaatatagtgagattttcgttttcgaaaaaaaatttaaaaaataattattgtggtgtgtataatatatttttttaaaggtataggtataaaagatgtttttaagagtgatttgattttttggtatttgggtagtgttattttagtaaatatttattgttaaatattatggtgtttggaatatattatataaaggtatatgtataaaaaagaagtttttaataatgttatttgtaaaaataaaaaaaaaagttaattttttaagttttttatagaagtattttatagaattgatatagttaatttttatagaagttttggagggtaggtgtatttttgagaatatttgattttgagagtaaaatatttttattttatagatgaggaaataagtaaagagaggttgagtaatttgtttagggtaattttgagttagaatagttagaataggggtagaggaatataaggttgaagatttagaaagaagaatagatttgtaagggtaggtaggttatttggtatttttgattacgtagaggaagaatgaattttttttggaatgcgatgattgtgtaattgagtttatgaagtgagggaagagttttttttgcggggagagtagttcgtgtttatttttagaggttggaattgtttcgggaacggtagatagtttagggtggttgttttagagtttttgtatacgtcgttcgtttcgtttgaaggtttttttttatagagggtagtttggtttgttatttttttttttttaggttaggtgttatttttttggggaagaattttttgtatattttgtgtaaaaatagtatttttgttattttttaggattttatttttttttgtttttttttatggagaattggtggtgtaaggcgattgtttattagagttaaattatttaggttttgaatttcggttttgttaatttttagttgtgtgatttggggtaggttatttttttgtatttttattgttttatgtggaaaatgggggaaatgataatttttattttttaacggtggtttgaggatttaatgagttaaatgatttaaagagtgtgtagtttacggtaaggatcgtatgtttggtttgtatttttaaattattaaaatgtatttatagtatattcgtagatgtttgataggtttttgaaattgattatttttaaaattggtgtgattttttttaaaatttatttttttgtaaggtttttattttagttgattataatgttgtttttgtgggtgattaggttataaatttagatttattttggattttttttttatttttttcgggtatgttatttgttagtaagttttattttgtgtttaggttttttttagattttagttatttttcgttagttttattgttattattattatttatcgtagtggtttttttagttttaatagtttgttttttttataatcgttagggggattttgttgaaattttagttatagtttgttatttttttgtttataatttttttgtggtttttgttttatttaatattttgatagtattcgaaaaagtttggtttagtttggttttcgttattttgtttttttttttcgttgttttttttttttttttcgaatttatgttagttttttttttttatgttatttgttaggtattttttagttttgggttttttatatcggttgtcgtttttatttggtttgttgtttttagatatttacgagtttagtttttttatttttttttggtttttgtttagttgttttttttttggcgattatttttttttgattttttatgtaaaagtaatagtttttttttgtttgattttttttttataatttttattattatttgacgtatttttgtatatgtttgtttttttttttatttgttttttttgttaagatgtgagtttttttggagtagggattgttgtttgttgcgttttcgattgtattcgtagtatttggtttatagtatgtatttattaaatgtttgttaagtgaaggagatggaaagaagtaaatatatttaagtaaggtagattattagaatttttatgaggggttaagtgggagaaataataaaatataaagttttgtgtgttgttgaagttggaagtttatcgttattttttatttagttgataggttttgttgtagttgaaagaagaattggtaaaattgtttgtttttgttattaggagttattttgaattttttggatttttgaaataagtttgtttgtaaaataaatttagtgaggtttttggtgataggattttttaatcggatattttatggttttgtgatttgtataattgaataggaagtttatgtttatttttagtttgtttttaggaaagaaagtagtaatggggtgatagggaggattttgttttttgaaggatatgttgagagggaatagtcggtgtgaggggtcgtttagtttaatggtgaaatgtttagttaattggaatttgattgtttggttttaaatgttggttttgttatatgtggtttgtggaaggtacgtagatatttgtgttttcgttgttttatttataagttaatgataggaagattatttattttttagaggtatgattagggataaataagttaatgtttattaaaaaaaaaaataatagtataggtgtatatgtttttatttaaaatttttggggttagatgtgttttagaatttttatttttttatattttagaaaggtaatatgatgtatatacgatgttatataatattttttagtaagttttgtaatcggttgtgtttatatttttgtagtaaaatgtatgaatattcgtaataagtgagatttaataaagattagaaagggttttgttttattttaaattaggttttgttattaaaagagttaaaagaagttttttgtttttagagtattttggatgttggaatggtagataagggattatgaataaattagaaattaatatttagagtttattatatattttaggtatataatatttaatttgtataatatttttgtgaattaggtattgttatttttattttattaatgggtatattattatttttgttttatatatgagaaaattgaggtataaagaggttaaagaatattagttaagcgtggtgttttatgtttgtaattttagtattttaggaggttagggagagaggattgtttgagtttaggagtttaagaatagtttgggtaatatagtgagattttattttttaaaaaaagaaaaagaatatgtttagggttatatagttaataagtggtagaattaggatttaaatattggtaatttggttttagtgtttgggtagttgtttagtaggttatattgtttttttgtttagaagagtgtttgatgtgtattaagtttttaatagatgttaattattgttgttattaagaaagagaatatttagggtcgagtacggtattttatatttgtaattttagtattttgggaagttaaggtgggaggtgggtggattatttgaggttaggagtttaagattagtttggttaatatggtgaaattatgtttttattaaaaatataaaaattagtcgggcgtggtcgtgggtatttgtaattttagttatgcgggaggttgaggtatgagaatcgtttgaatttgggaggtagaggttgtagtgagttaagattgtgttattatattgcgttttagtttgggtaatagagagagattttattttaaaaaaaaagaaaaaaaaaaaaagaacgagaatatttagggatagtaataggatagagagattaggtatttatttagttttaggacggttttataaaggaaaggatttttgggttgggatttgaaagataagaaagattgttaggcgaaagaaggaagttttacgtggagtgagtagtttttgtaagggtttggtaaaaaaaaaattttttgaaaaatttgatattgatatggtagaagatatagataatatttaaatgaggaggatggaattagttttttatttttgttgtaataaataattataaatttagttgtttaaaataatatatttgttattttatagttttgtaggttagaagttttatattggttttagttgaaattaaggtattggtagggttgcgttttttttggaggttttaggggaaaatttattttttgtttatttaagttgttggtagaatttaattttttgagattgtaggattgaagtttttgtttttttattgtttgttagttgatagttatttttagttttaagaggttgtttatagtttttgattttgagttttttttttttatttttaaagttaataatggtaggttgagttttttttatattttgaattttttttgttttttttgttattatatttttgagttatttttttttttttattatttgttttttagagtttatatgattagattgaattttattaaataatttagaaataatttttttgttttagggtttgtaattttaattttatttgtaaagtttttttttgttatgtagtgtaaataatatataggtttcgaggattaggatgcggagtagggttggtattatttggtttattatagtttgttttttgatttttatagatttatatttgttttatatttaaaatatatttatattattttaagatatttatgagttgtattttattatagggagtattttaagtaagattggggagttagaagttagtttgggaaggtttagggaatgatggtagggtttgaagatagagatggagaaaagatgataaaaaaaggaatttttttttcgttgatttttgttttttttatgtttatagttttttaatttagttgtttgttttttagg

SEQ ID NO: 52 - DNA, 14147 bp, Artificial Sequence
  chemically treated genomic DNA (Homo sapiens)
tttggagagtaaatagttgagttgagaggttgtggatataggaggggtagaggttagcgggaggaggatttttttttttgttattttttttttatttttgtttttaaattttattattattttttaaatttttttagattaatttttagttttttagttttgtttgggatgttttttgtgatgggatataatttatgggtattttaggatggtgtgaatgtattttgaatgtgaaataaatgtgaatttgtgggggttagagggtagattgtggtaggttaaatgatgttaattttgtttcgtattttaattttcggaatttgtatgttatttatattatatagtagaaaggaattttgtagatgaaattaaggttataaattttaagatagggagattatttttggattatttgatgaaatttaatttaattatatgagttttgaaaagtagatgatggagaaagaaaggtagtttagagatgtgatgatagaagaggtaggggagatttaaaatgtgagagggatttaatttgttattgttggttttgaagatggaggaaggaggtttagaattaaggattgtgggtagttttttaaagttgggaatggttgttagttgatagatagtaaggaaatagggattttagttttataattttaaggaattggattttgttaataatttgaatgagtaggaaatggatttttttttagagtttttagaaggaacgtaattttgttaatattttgattttagttgagattagtgtgggatttttgatttatagaattgtaagataataaatgtgttgttttaagtagttaaatttgtgattatttgttatagtaagaatagaaaattagttttattttttttatttgaatattatttgtattttttattatattaatgttaagttttttaggaggttttttttttgttagatttttgtaaaggttgtttattttacgtggggtttttttttttcgtttagtagttttttttattttttaagttttagtttaaaggtttttttttttatgaagtcgttttaaaattgaatgaatgtttgatttttttgttttgttattgtttttgaatgttttcgttttttttttttttttttttttttttgagatggagtttttttttgttgtttaggttggagcgtagtatagtggtataattttgatttattgtaatttttgttttttaggtttaagcgatttttatgttttagtttttcgtatagttgggattataggtatttacgattacgttcggttaatttttgtatttttagtagagatatggttttattatgttggttagattggttttgaatttttgattttaagtgatttatttattttttattttggttttttaaagtgttaggattataggtgtgagatatcgtgttcggttttgaatatttttttttttgatgatagtaataattaatatttattgagagtttaatatatattaggtatttttttaagtagagaggtaatatggtttgttggataattgtttaggtattagggttagattgttagtgtttgaattttggttttgttatttattagttgtgtgattttgggtatattttttttttttttttaagaaatggggttttattatgttgtttaggttgtttttgaatttttgggtttaagtaattttttttttttggttttttaaagtgttaggattataggtatgaggtattacgtttggttgatattttttaatttttttgtattttaatttttttatgtgtaaaatagggataatgatatgtttattagtaaaatggggataataatatttagtttatagagatattgtatagattaaatattatatgtttgaggtgtatgataagttttaaatattagtttttgatttgtttatagttttttatttgttattttaatatttaaaatgttttaagggtagaaagttttttttaatttttttggtggtaaaatttgatttgaaatgaaataaggttttttttggtttttattgaattttatttattgcgagtgtttatatattttgttgtagaaatatgaatatagtcgattatagagtttattaaggggtgttatgtaatatcgtatatgtattatgttatttttttgaaatgtgaagaaatggaaattttgaaatatatttggttttaggggttttgggtaagggtatgtatatttgtattgttatttttttttttaatgggtattgatttatttatttttgattatgtttttgagaagtaggtagtttttttgttattaatttataaatgaggtagcggaggtataaatgtttacgtattttttataggttatatgtggtaaagttagtatttggagttaggtagttaggttttagttgattaagtattttattattaggttaaacggttttttatatcgattatttttttttagtatgttttttaaagaataggattttttttgttattttattattgtttttttttttgagagtaaattggaaataaatatgagttttttgtttaattatataagttataaagttatgaagtgttcgattagagagttttgttattagagattttattgaatttgttttgtaggtaggtttgttttagaagtttaaagagtttagagtgatttttggtggtaaagataggtaattttattagttttttttttagttgtaatagaatttattagttgagtgaaaggtgacggtgggtttttagttttaatagtatatagggttttgtattttgttattttttttatttgattttttataagagttttagtaatttgttttgtttagatatgtttatttttttttattttttttatttagtaagtatttggtgagtgtatattgtgggttaggtgttgcggatatagtcgagaacgtaatagataataatttttgttttagaggagtttatattttagtaggaaaggtagatgagaaaaaaggtaaatatgtataagagtgcgttagatggtggtaagggttatgggaaaaaaattaagtaggggagagttgttatttttatatggagagttaggggagagtagtcgttaaggaggggataattgggtagagattaaaaggaggtgaaggaattgagttcgtgagtatttgagagtagtaagttaggtggaagcggtagtcggtgtgaagggtttaaggttggagagtgtttggtaggtgatatggggagaggaggttgatatgggttcgggggagaggagggaggtagcgggagaggagaatagagtgacgggggttagattgagttaggttttttcgggtgttgttaggatgttgagtgagataggagttataagagggttgtgaatagagggatgataggttgtgattgagattttaataggatttttttggcggttgtgagaagaatagattgttggggttgaagaagttattgcggtagatgatggtggtagtagtggggttggcgagaagtagttggggtttggagaaagtttgaatatagaataggatttgttgatagatagtatgttcgggggaggtgagagaagggtttagggtgagtttaggtttgtggtttaattatttataaagatagtattgtggttagttgaggtgggagttttgtaggagagtaagttttgaggggggttatattagttttggagatggttagttttagaggtttgttagatatttacgggtatgttatgaatatattttaataatttaaaaatgtaagttaggtatacgatttttatcgtgggttgtatattttttgaattatttaatttattgaatttttaaattatcgttaaagggtggggattattattttttttattttttatatgaggtaatggaggtatagagaagtaatttgttttaagttatatagttggaagttggtagagtcggaatttaaaatttaagtggtttggttttagtgagtaatcgttttatattattagttttttatgaagagaaatagagaagggtaagattttagagagtgataggaatgttgtttttatatagggtgtataaggagtttttttttaaggaagtgatatttggtttgaaggaggggaggtagtaagttaggttgttttttgtgggggagggtttttaggcggagcgaacggcgtgtataaaggttttgaggtagttattttgaattatttatcgttttcgagatagttttaatttttgagggtaagtacgggttgtttttttcgtagggagagttttttttttattttatggatttaattatataattatcgtattttaggaagaatttattttttttttgcgtgattaaaggtgttaaataatttgtttgtttttgtaaatttgtttttttttttgagtttttagttttatgtttttttgtttttgttttggttattttggtttaaggttattttgagtaagttatttagtttttttttgtttgtttttttatttgtaaaatggggatattttatttttaaagttaaatatttttaaaagtatatttattttttaaggtttttgtgaggattaattgtgttaattttgtaaaatatttttgtaaaagatttgaggggttgatttttttttttgtttttataagtagtattgttaggaattttttttttatatatgtgtttttgtatagtatattttaagtattatagtgtttaataatgaatatttattgaaataatattatttaggtgttagaaaattaaattatttttagaaatattttttatgtttgtgtttttaggagagtgtattatgtatattatagtggttattttttgggttttttttcggagacggggattttattatgttgtataggttggtttggaatttttgggtttaagtgatttttttattttagtttttgtgtttagttatatattatagttttgtgaatatatttttttaatgtaataatatagtttttatttatatatataattagtatttttagaaatagtttttatatttgtgtttttatagagtatattatatattttagttttgtgaatatatttttttgaaaaggaggaaaatttttatttatatataaattggtatttttagaaatatttttgatatatgtatttttttgtagtgtattttaggtattatcgtgtggtaaatattttttgggggttggtatttgaatagaaaagtgtttttgatgtgtggtagatattttatagatattagttattagttagtgtgttatttttttttttttgtttttgtaattttattttatgtattatttgtattatttggtttttattatttgtgtgattttattttttattttttttcgtattttgttttagttatattggtcgttttgatgttttttgaatatggtaggtattattttattttagggtttttgaattggtatttttttttgtttggtatgtttttttcgtagatattaaggtttttttcgtttttatcgtgaggttttaatttaagagttattttttttatgtttaagattttaattatttttaatattcgatttttatttgttttattttattatttttttttagtatttgtttattatgttaattttatttatttattttgtttatatagtttgtttttttagtttgggtttttttttttttttttttgagatagagtttcgttttgttatttatgttggagtgtatggtgtaattttggtttattgtaattttcgttttttgggtttaagtaatttttttgttttagttttttaagtaattgggattataggcgtacgtcgttatatttagttaatttttttgtattttagtagagatggggttttatcgtgatgtttaggttggttttgaatttttgagtttaggtaatttatttattttagttttttaaagtgttaggattattggtgttagttatcgtgtttagtttttttaatttttaataaatgttagttttataagtataaatatttcgttttgtttcgttttttgttatattttagtatttagaagagtgtttggtatttataaggggtttagtaaaggttggttgtaggaatagttttaattaattagtttttatattttttttttttttttatgtgatttttatattggtgttttaaattattttttttttatttatttatgggataaatttttattgagtatttgttgtttatttggtatatttttagttgttggagatatagcggtgaatgagtagataaaaattgagtttttatgggatttatattttaatgaggagagatagataataaataagtaatttatatagtgtgttagatagtgataaagggtaacgggataaattagggatttggtttgagttttgttgggtgtgtagttttagatggttagggaggggttgattttttttgtttttataagtagtattgttaggaattttttttttatatatgtgtttttgtatagtatattttaagtattatggtgtgataattaatttttaatgaaataatattatttaggtataataaaattaaattatttttagaaatattttttacgtttgtgtttttaagagagtgtattatatatattatagtggttgttttttgggttttttttttttagaaaaagggatttcgttatattgtttaggttggtttggaatttttgggtttaagttatttttttattttagtttttcgagtagttgggattataagtgtatatttttgtgtttagttatatattatagttttgtgaatatatttttttaatgtaataatatagtttttatttatatatataattagtatttttagaaatagtttttatatttatgtttttatagagtatattacgtattttagttttgtgaatatatttttttgaaaaggaggaaaatttttatttatatataaattggtatttttagaaatattttttatatatgtatttttttatattgtattttatatattatagtgtggtaaatattttttgggggttggtatttgaatagagtgttgaaaggaattatgtagagatttgggggtggtgtttaaggtataaagaatagttaatgtaaaggttttgaggttggtttatgtttgttatgtttgaggagttgtgtggtggaattagtgtggttggagtatagtaagggggtgggaaggtataggcggtaatgttagaaaggttatttgttttattattaatttatagttaatatttatttatattggaagggattttagttttgattttttattttataaatgaagaaaaaggtatagagaggaagtggttaaattatttatttaaggttatatagttgttgggattggggggtgggtgggtgttgagagaaggtgaggaatgaagattgttttgtaggtagagggaatagtaagaataaaagtttggaggtgagaattaatttggtttttaaggattgaggttttacgtggggtgggatgagatttaagaggggagttttaaaaattattttgtgttttgagtattttttgggttatttttgagtaaggaatttaatttttttatggtttaatttttttattatttattttatggggttgtggtgaggattaaaggaatttatttatatgaaatattttgtttgatatacggtaggtgtttaataaacgttagtttttattggtattattattattattggcgttaatgtatttatttattgtagtgaggtagaacgtttttgtggttacgagtgtgattaggttgatttattattaagaggtggaggatagggaaggtcgtatagtgttttattataaggaaaagaggattagtacgtttttttttgggaagggaaaaaaaaagagaaggaaattgaaagtatacggtcgatttttttttaattataaagtattggatttacgggagggtatgcgggggattgtgtaagtatataggggtgtgggggaggaaggttaatgaatagatttattgtaaagggaggggtgatgaggtttatcgtttgaggggaaggggagtagaaaattttatagatttttgtattatagtgagaggagagaaaagttattatatagattgatttaaagtagagagggaaaaggttatggattgagttattgaaaatagggagatgtaaagtattaaattaatttattattaaaaaggagagaattttaagcgttagagcgatagtttacgaaaaagaggagatagggtaatggattgatagttaaagggacgtgaatttaaatatgaagattgatttattataaaatggtggtggtggtggtggggggggggggtggttttgaaaaaagttatggattgatgtattgggggattggaggaggtaggaatataaatttaggtagatttattgttaaagagggatgcggaggagtgcggcgttacggattgattcgttacgatgtataggaagggtggaataaataaggttacggacgggttttttgaaagttgaggttaggagaaatttaaatatttagatatatttattattaagggggttgaatattgttataggttagttttttataagtgggggtgggtggggggcgggtgggggtaggggtagggggaaagtttatggacgagtttattttaagttggcgtggggaaaaatataagtacgtagatcgatttattatataacgggagggggaggttaggttacggttagatttattataagggacgaagggtttgagtaatgttatacgtaggtttattagtcgtggtggtggcggcggggagtcgaatattagtaggttatcggttaagttatattttttgcgcgggggcgggaaggatacgtggggttacggattgggttttttattttttaggtttagagtttatttgtgtgtagcgtggcggtggcgttggtaatgttggtagtttcggggggcgggggttttatacgcggttttatcgttttttaggtttgggtttcgaggcggcggtggaggtggtggtggcggtggcggcggtagtatttagaagtcgtttttgcgtttttttatagtttacgtgggttcgaggaggaggagtttaatgtttcgtcgttcgttgattggttaaagcgttattaatcggtcgtaaggtttcgaggggttgggggacgggtttttttttatagagttgtgtcgtgattggcgtaaggggaaatgatggaacgtttacggtttttggagtttcgaggaggcgcgttcggtttttacggtgttttacgtcgattggtttaaggattgacggattgtgagtaattgaaaaggttcggggtttgtgtcgggggggcgggggtttgttttatattgattggtttatatgggattgatggaagatagtttttaaggacgggggtgggtggttttgtttttttttgattggcggacgagggatttttagatttttgttaaaatattaagggggcggtgtcgtacgttatgttgtttagcggaagtagggtttgtatagaaatgggcgtagtagtcggcgggagtgggtcggattgggtttcgcgtaggcgggtagggtagttttacggttagataagattatagagttgggtaaagacgaatttagaatatagcggaggtaggagggtaggatggttgttaggtatacgaaagagtattgagtggtagaaacgaaatgtttttagagggtagggttgaattgcggttagagttaaaaaggggaggaatttggttttgtattgattggcggtggttggatttaatttagaataggggttcgattagggagagcgggatttaggtttgtgtttattggaagttggaatatttataagtaggggttaagataaggtagggttgagttagggtttgggtgtaatttggggtatttggggaatgattgggtgtgtgaaagcgtaaattttagggttttttgattgttgtgggaatgaataaatttttattatgaattggtttattttttatggtaatttaaagggtggcgtttaggaaaaggaatggaagaaagggtgaggtggggggtttaggttgttaagatgatagaagagagggtagtgtataaggttaattggtaaatattgttaggtaataggttggaggtaggattgttggggtattttggaggttttatagagagattggatttttgggttttttagtaattttgtgttttaggaataggttttcgtggtaattagtagggtttatggggaaaaagaagggttatgtgatttaaaggtatttaggttttttaatgtttgaggatggggggaagaagttaatggtgaggtttttttgggaaattttgtaggttttgtagttttttaagtttttgaaaaagaggatagaagagattgaataaagattgggtttgggttacgtttttaggtttgttttgattttttttttttgattttagtttagagggaaagatggttttttttttttttcgtttttttttttttttaggttattattttaaatatagagtttggtagtggggtgagttgtttttatttttagtaatatgtggatatgggttttgatatttatggagtttttggtgaggttgttgttgagtttagagaaaagaaataagaaagggtaaaatgggttttatatgattatgatgatttttttttattattttaagatttatttatattttggatgatttttatttggtttatttttatgtggaaatgttaagttattatttggtttttattgatttaaagattattaaatgtttattgtatgttaggtaattttaggtattgggagatagtagtaaatataataaataaaattttcggtttgatggattttaaatttttgtaaagaaagatataataaaaaattaatggaataaaagttatgtgttagatggttttaattataataataaaaattaaaaatgagagataataaggagtataggagtggggggttgtaattttaaagagggtttagggatggttttacggagaagtatttgagtaaagatttaaagatagtgaattttgagtagtgtggttatatggaggatgtgttttatatataaggggtagtaaatataaaggtattgaggtgggagtgtgtttggtatgtttgaggtgtagtaaagaggttattttggttggagaagaataagtgaagggggaatgtaagaggtgaggttagagaggtaatgagggagataaattgtgtgaagtttataaggttatggtaaggattttggttttgattttaagtgagatgggagttaagggaaggttgtagtagaggaaggaggttgaattatatgaattagttagttgattttttttttttaagttagtttggattagatttcgtttaaaagaattttaattgatataaagggttaaggaaggttttttttaagaatgaagaatgagaaggaatcgaagaatgtttaatggttaagtagtaggaaggttttttttataaaaaggataagaggtaataaagagttgtttgagaagtagtgaggttagagtgttagaaattgagtggggagggaaagtggtttaagataaggtttaagagataggaagaggttagattatatagggttttaatataataaggaatgtggattttattgtgttgttaatgtaggagttagtttgaggggtaaatgaaattaaatattgttggaaaagtagagagtaataagataggatgttaaattggaaaaaaaagtagtatgaatttatgtatatattaatattttttatatttttatttttagtttagaatttttttttgaatttgattagttttaatgatattttttaaaaatttattttagtgtttaataagtgttttatatttaataggttttagattaaatttttgatttttttttttaaatttattttttttttaatttttttattttagataatggtaattttatttttttagttgtttagttaaaaatttgggttttttttttttatattttatatttagttagttattttttttaaaattatgattgttttattgtaggtaatgtttttgatttttatgatatgttttttttatagtattgttaatatttgatatattatattatttatttgtttattgtttgttttttttgattagaatgttagttgtatgagggtagattttgtttttttttgttttttgttttatttttagggattagaatagtgtgtggtatagaggaggtatttaacgtatgttgaatgaataagtgattattttattaaaaggaatttgaggttggttgagtgtatgtttagggataggaaataaatgaagtatgggtgttgttgttagagagtaagaatatttttaagaatattttgggggtaatgtttaaagaatagaagaatgaatttgattagtttttaagggataattttaatattaaaaaagagaataaaattagttaatggtgtaagtttattttatgaaaatttatgagtttaatattttaaaagggagaaaaatatagagtttattaaatgttagttgtaatataaaagggatatgtttattattgttgatttatttttatttgttatgtgagaagtaaattattattgatttagtatgtaaggtagtgtgaatagttatatggttatgtttttttttttttttttgagatggagttttattgtgtcgtttaggttggagtgtagtggcgtgatttcggtttattgtaatttttatttttcgagtttaagcgatttttttgttttagttttttaagtagttgggattataggcgtttgttatcgttttcggttaattttttgtatttttagtagagacggggttttattattttggataggttggttttgaatttttgatttcgtgatttatttatttcggttttttaaagtgttgggattataggtgtgagttatcgcgttcggtcgttaggttgttttttttataattatatgtttatttatgagatgtggatgtgtatttttttttgtgttattaggaaagaatatagagattttattttttttattttttaaataaagaaatatattaagaataggaagaattgatatttttgattatataaaatgattagaaagttagtttaaagtatattttaagtaattaaatatttttaaaggatagttagttatatagatttaaatttttattttttagaaaaattaaatttttagatagttttattaattataataaagtagtaagatttaattatattttttattatattaatagattaggttagtatattaaaaagattaggtaagggggtaggtattgataatttaaatattttattttggggaagtacgtggagttttaaaatattaaaatttatttgataggtttaggaattttgtgatataataaggaaagtttttttatataaattagattttagttgggcgcggtagtttatatttgtaattttagtatttagggaggttgaggtgggtagattatttgaggtcggagtttgagattagtttggttaatatggtaaaattttgtttttattaaaaatataaaaattagtcgggagtggtggtgggtgtttgtagttttagttatttgggaggttgaggtaggagaattttttaagtttaggaggtagaggttgtagtgagttaagatcgtattattgtattttagtttgggcgataagagtaaaatttcgttttaaaaataaagtggatttggtttaaatgattattagtttagaattgtgttgattatgaaagtaggtcgtttaattaaattatttgttaattggtttgaatattaagaattagaaattttagtaggtttgaggtttttttgggtttattagtatttgttagttttttttatggttggaaaggtttgaaaagataaaaattattgaaattttaagggaggtaattttggaaaaaatgaatgtagaatagatataaatataaaatataattaataaagaagtttaaattaatggtatttatatttgtgagatgttgttaatttaagtgtattgtttagtgttttt

SEQ ID NO: 53 - DNA, 9021 bp, Artificial Sequence
  chemically treated genomic DNA (Homo sapiens)
tgtttagtttagggtttgtgaatgtacgaatcgatattttgtatttagttattttggtggggaggtggagaatttttgtgtttagtttagggattgtaaatatattaattagcgttttgttaaaatagattattcggttttattaattagtaggatgtgggtggggttagataaaagaataaaagtaggttgtttgagttagtagtggtaagttgtttgggtttttttttatattgtggaagttttgtttttttttgtaataaattttgttgttgtttattttttgggtttatattgtttttatgagttgtaatatttattacgaaggtttgtagttttattgttgaagttaatgagattacgaatttttcgggaggaatgaataatttgagacgcgttgttttaagagttgtaatatttatcgcgaaggtttgtagttttatttttgagttagcgagattataaatttattagaaggaagaaatttcgaatatatttgaatattagaaggaataaatttcggatacgttatttttaagaattgtaatatttatcgcgagggtttacggttttatttttgaagttagtgagattaagaatttattaatttcggatatattagttattagggaggttgaggtgaggggattatttgaatttaggaagtcgagggtgtagtgagtcgagattatgtcgttatattttagtttgagtgatagagtgagattttgtgttaaaaaaatagaataaaataaaataagaacgttgaataggttgtgtgttaattttgagatggagtttagatttaagaatgattttgaggtttagatttatatttaagaggatgattttagtttggtatttataggttttttaggtattttagatgtattttgttttgaattaagttttttgtttttgaatttgttttttttggtaaatagtattaagggggttagaaatttgggggttgtttttatttttttttttttattatgtatttttaatgggtggttggatttgtggttgtattttcgtgattttttagtttttttttagtgatggttttaggtgggtttttattttgttttttaaatggtttttttgttttgagttttattttatttgtttttagtttatttattgagttattttagagattattttgattttttgtggatatttttttggtggttttttttttttgttagttagaaattgtttttgattgtatgtaataaatgtggttacgttatttaattaaataaaggtttatttttttcgtgatgaaaagtatatagataagtagtttatttttatcgataattattgagggttttttatgatttttatagtaatgaaatgtgtatttatagtataaagatatataattttaaggttttaatataattgggtttaagtatagtattttttgttttagtttttaattgtttaggtgattttattgtgtagttagggttgataaatattgtatttaggtttagtgtttttgatttgtagttgaggtttagagagaattattgaaattgtagttttagttatttgggaggttgaggttggagaattgtttaagtttagcggggtgaggttgtagtgagttaagattgtattatcgtattttagttcgggcgatagagtaatattttatttaaaaaaaaaaaaatttttggtttatttttttgtttattttttaattatagaggtttttaaatatgaatttttatttttaggaaggttgaaatgatatattataagcggtttagttatttgtacgtgtcgttatttgatttaaggtatttatttttttttattatttttgataaagttgaattgtttatatgtgttatatttttttttttttttaattttttttttttttttttttttttttttttttttttttttttttttttttttttttttttttttttttttttttttttttttttttttttttttttttttttttattttttttttttttttttgatagggtttgtttgttttgtttttttaaattttggggtttaagtgtaaaggttttttttatttgatttttttattttattttatttaagttagatattttacgatgatgatgatgattattgttgagataggattttattttgttgtttaggttggagtgtaatggtgcgattataatttattgtagttttaattttttgggtttacgcgatttttttattttagttttttaagtagtttggattataggggtgtattattatgttcggttaattatatgtgttagatttaatttacgttttagggttttaaataattaaggttttattattttgttttaataaatatatttttataaagatttggaaggtaggttgaaatgtggaatttttggattttttttagttttacgtagaagggtagtagtggagagttggttgtttgttcgtttttggtttttttttttttttttatttttgttttttgtggtattgggtagggtttacgtttaaggttagtagtgtatttaataagggatagtttttgtgtggtttgtttaggattttatatataggtttagggttttttgggtaggaaattttaggattcgggtatttaagtggtgttttaaatagtggtttttggtcgggtgtggtggtttatatttgtaattttagtattttgggaggtcgaggttggtagattatttgaggttaggagttcgagattagtttggttaatatggtgaaattttatttttattaaaaatataaaaatttagttaggtatggtgtgtacgtttgtagttttagttattcgggaggttgaggtaggagaattatttgaatttagtaggcggaggttgtagtgagttgagattgtattattgtattttagtttggtgatagagtgagattttatattaaaataaatatataaataaataaaaatagtgatttttaattgggagtgatttggtaacgtttggaattatttttggttattttagtttggtagggagggatagggtattattggtatttagtgagtaggggttagggattttattgaatattttatagtgtataggatagtttttatagtaaagaattgtttggtttaaaatgtttatagtgtttatattcgatgttttgtattaggaagatataaatatttttaaatattatagagttaaattttttatttttgttttagtagagatgatatttttgcggggggagtatttttttggttttaatatatttttttttttatgggagatgatgttagaagagggatagaataggacgattattttacgaaggtattatttaggtattattagatcgttttaaaagaagagtaatttattgttttaaagtagttttttcgtgtttgtgggcggattttttggtaagtttataatgaattgaaatttgtcgaattttttggaatttaaagaaattttagttttgggtaaaggttttttggttagtatttgtattgtttatgtaatcgtttagaatatacgaattatttggagattattattaaatataataggtaaaattgtaaatatgtatattttttagaggatgataaaaaaatgtgaattgtatttttttgatagaggatgtattagagtttgagggtttaaatagcgtaaataataaataagtaaataaatcgatagtagtgtattttaaacgaggttggaatagtttttattgttgttttatattggattttaattaagttttagtattttgttatatttaatattaagtattaggttggacgtggtggtttatgtttgtaattttagtattttgggaggtcgaggtgggtagatggttggtttgagtttaggagtttgaaattagtttgggtaatatggtaaaattttatttgtatttaaaatataaaaattagttaggtgtggtggtatatgtttgtggttttaggtatttgggaggttgaggtaggaggatggtttgaatttaggaggtggaggttgtagtgagttatgatggcgttattgtattttagtttgggtgatagagcgagattttgttttaaaaattaaataaataattttttcgtttcggataaaagtagtttgtattatttttttattttataatatgtttttgaaatattttttttgaaaggtaagttatatttattatttttgttgtatggaggtattataaattattttattattttattttttttgagtgttgtggtttttaggttagataaaaacgtaggtgatgtttagaagttaattagttgtcgtttggttatttgtagggttgtggttttgttaaataggaaaaatataaaaagaatatcgaattttgttaattaaataagaaattttatattaaggattaagaaaattgtaggggaagaaaaggtaagtttcgggattgaggtgtagcgattttttatatttttagaaaattaaaaaataagataaaaaaatgaaaattataaaagtatttattttggggcgttttaattgttgagtaataaatgagacgttgtggttaaatttagttataattaatgatatttttagataaagtgattttagatttttaaagcgtattttgtttatattattttgttaatttcgcgtattgtaatcggcgggttacgttttcgtgaaaagaaggttgttttttttatatttcggggttttggacgtttttcggttgcggggcggggggagttttcggcgtacgcggttttttggtttcgtttttagttattttcggttattcgcgattcgaggttgtcgtagggggcgggttgagcgcgtgcgaggcgattggtttggggttagagtgggcgaggcgcggaggtttggtttataaagtagtcgcggagacggggtgttggtttgcgtcgtagttttttgtagcgtttggggttttcgttgtagttttcggaattaggatttcggcgtggtttagcgagttatggcgacgaaggtcgtgtgcgtgttgaagggcgacggtttagtgtagggtattattaatttcgagtagaaggtaagggttgggacggaggtttgtttgcgaggtcgtttttattcgttcgttttttcgcgtatttttgttaggagcgggtcgttcgttaggtttcggggtcgttttggtttagcgttcggtttcggttcgtgtcgttcggtcggtgttttcgtttttagcggtgcggtgtttaagtgttgagttatcgggcgggttcgggcgcggggcgtgggatcgaggtcgtcgcggggttgggtttgcgcgtggcgggagcgcggggagggattgtcgcgggtcggggaggggcgggggcgggcgtgttgttttttgtggtttttgggtcgtcgtcgcgggtttgtcgtggtgtttggagcggttgtgttcgttttttgtttggtcgtgttttcgtttttgagggtttcgcggatatcgagtggcgtagtgttaggtttagttcggggatggcgattgcgtttgggttcgtttggtgttttcgtattttttttcgtttttcggttttagcgttttaggttagggagttttcgtttttgtatagttttaaggttaggaatggtttttatatttttaaaaggttttggaaaataaaaatacgtaatagagatcgtttgtgtgatattttgtagggaagtttgttggtttttgttttaggttatgattgggttgtaagggtagagaaggtagttttgaatagaggttttttttttttttttaagtttcgggagttagaggtttaattgatttttttggggatttttgagggtagtgattttaattttgggtgtatagttagtttatttgaagattttattaaaaatatattagagtttaattttcgattaattatattaaaatttgttttagtgtagggtgagtattgttgttttttgaaagtttttaaaagtgattttgatgtgtatttacgattgagaattgtcgtttgaggatagtgggtggagtttcgtatttggaaattagaagatttggagtttttattatatcgaattggtatttaataattgttgtcggagtattttttaagttatattttcgtaaagtggttttaaaattgttttgttagtaggtaggttgttaagatggttagagataaatttttgaacgatttttgtaaaatatatagaaatatttttagaatttttattagtaaaattataaaacgtgttgtaaggaaggtgtttgtgataatattgtttttagaattttagtgaagttattaattggtggaaaatttttttttgtattcggtttaaaaattatgagggaatatttattatacgaatgagatttagtttttaaaggggtttatagaaacgtgagaggataggaatagttagtttgtgtaaatgtttgaaatatatgtgagggagataatgagtttagtttttttttttaataggtttttagattttttggaaaaggttttttggtatttgattttattttgttgttttatttgttagatttttttttgtttttttttatttttttttatataatttattagtattagtgttttgttttttagattaagtttcgttttgtcgtttaggttggagtgtagtggcgcgattttagtttattgtaattttcgttttttaggtttaagtaatttttttgttttagtttttcgggtagttgggattataggcgcgcgtcgttacgtttggttaattttttatattttagtagagacggcgttttattatgttggttaggatggtttcgatttgttgacgtcgtgatttattcgtttcggttttttaaagtgttgggattataggcgtgagttatttcgttcggttattagtgttatttttaagacgtttttgaggaattttttttttttggttattgagaatttatgtatgaatttaggttttttattttttttgagtagtttgtatagtttttttttttaagcgtttgatttcgttttgtttggtgttcgttgtatttgagaatgagttttggatagtggagtattttagttttttagatatgtagagataatatattggttattagttatttggtttggtttatttcgtgtttaaaattttggattttttgttagtttttatagattagaattttttacgtattaatttagtttttttagttttttttgaagaatttttggagatttttttatattgagtttttattagtttaggatagtattgttgtagtagtttatatattttttcgttttttaggtttgtgttatttatttaagtttatagtttggtttttgtagggttgtattcgagtatagttatttagatgttttgaatgtattatcggttaaatggaggttttaaagaatttgttgtttttggttttgtgtttttgataatagagtgtttgagggataatttttatatttgagtttttttaaaattaaaggttgtagaagagttatagtatttattgttaaaaagaaaagaatttaaaaaggtagtaattgttaggatattttatttgagtaatgatattttttagtggaaagttatattttaagggttaatgttttttaattgttggtcgtatttgaaaataaattaagttaaaaataagagatattgatatgttgtatgacggtgtggtgtggatgttgtgtttattttagttttgagatttagttgtaatttttttgatttttgtatgtagttacggagtattattatttgttattattatttgaatggttatattgtttgtttttattttggtagagtggaaaggttatttaggttttagtgtttgaaaagattttagaaagtagtagtacgtttggttagattagaattagtttttttttgggggtagtggaatataatattttttgattgttaattaaaaatatttgtgatagtcgggcgtggtggtttacgtttgtaattttagtattttgggaggtcgagacgggtggattacgaggttagtagatggagattattttggttaatacggtgaaatttcgtttttattaaaaatgtaaaaaaattagtcgggtgtggtggtgggcgtttgtagttttagttatttaggaggttgaggtaggagaatggtatgaatttgggaggcggagtttgtagtgagtcgagattatgttattgtattttagtttgggcgatagagcgagattcgttttaaaaaaaaaaagaaaaaaatttatgatggatatttaaaaatatttattgagtggggagtggagagtaggggttttagggtagtttgttggatatttttagggcgattttttttttttttttttttaaagttaagtgagtatgttatatggaaaagggtgtgcgtggagaaaaagtaaggggttttagagtgtaggatgagatatatattttttgggttaaaaaggttgaggtaggagaatggcgtgaattcgggaggcggagtttgtagtgagttgagattatgttattgtattttagtttgggcgatagagcgagatttttgttttaaaataaaaaacgtttatatgtatatgtatatttaatatgtataaatataatttatttaaaagtatttattatataaataggtatttatattatttatttattgtaatagttaaagtttatgaagtatttaatattgatgtgtaggtatttattttgtttgttattttattaggtgttttttatgttatttaattatgaagtttggttatagggtgtttgtgtattgagtgtgggaataagattattattttttttttgaggatataggtttagagtagttaagtagtttgttggaggtttattggttagaaagtggttagtttgggatttggatatagatttttttatttttaagtttggttgttttttattttattgtgaggggtaaaggtaaattagttgttttttttgtttagaaattttttttaattttgtattttttttaaagg

SEQ ID NO: 54 - DNA, 9021 bp, Artificial Sequence
  chemically treated genomic DNA (Homo sapiens)
tttttaagaaaagtgtaaagttggagagagtttttgaataaagaaaatagttgatttatttttattttttatagtgaagtaaaaagtagttagatttgggagtggaaaaatttgtgtttaaattttaggttgattattttttagttagtgaatttttagtaagttgtttaattgttttaggtttgtgtttttaaaagggagatggtaattttgtttttatatttaatgtataagtattttgtggttaggttttatgattaaataatataaaaagtatttaatagagtggtaagtaaagtgagtatttatatattagtgttagatattttataggttttgattattatagtaaataggtaatgtaagtatttatttatgtagtaaatatttttgaataggttatatttgtatatgttgaatatatatgtatatgtaaacgttttttattttgagataagagtttcgttttgtcgtttaggttggagtgtagtggtatgattttagtttattgtaagtttcgtttttcgggtttacgttatttttttgttttagtttttttaatttaaaaggtgtatgttttattttatattttggagttttttgttttttttttacgtatatttttttttatatggtatatttatttgattttaaaaaaaaaaaaagaaaaagtcgttttggaaatgtttaataggttattttgggatttttgttttttattttttatttagtgagtgtttttaagtgtttattataagtttttttttttttttttttgagacgagtttcgttttgtcgtttaggttggagtgtagtgatatgatttcggtttattgtaagtttcgttttttaggtttatgttatttttttgttttagttttttgagtagttgggattataggcgtttattattatattcggttaatttttttgtatttttagtagagacggggttttatcgtgttagttaggatggtttttatttgttgatttcgtgatttattcgtttcggttttttaaagtgttgggattataggcgtaagttattacgttcggttattataggtatttttaattagtagttagaaaatattatattttattgtttttaggagaggattgattttagtttaattagacgtattattgttttttgaaatttttttaagtattgaaatttaggtaatttttttattttattaaaatgaaagtaagtagtatagttatttaggtaatggtgataggtaatggtgtttcgtggttatatatagaaattaaggaagttataattagattttaggattaaaataaatataatatttatattatatcgttatataatatgttagtgttttttgtttttagtttggtttgtttttaaatacggttaatagttaaggggtattaatttttaagatgtgattttttattggaaaatattattgtttaaatgaagtattttggtaattgttgtttttttaaatttttttttttttgataatagatattgtgatttttttataatttttaattttggaaaaatttaaatgtgaaagttgttttttaaatattttgttattaagagtatagggttaaaaatagtaggttttttgaaatttttatttaatcggtaatatatttaggatatttaagtagttgtgttcgggtataattttgtagggattaggttatgaatttaagtgaataatataggtttgggaagcgaaaaaatatatgaattgttatagtagtattgttttgggttaatgaaggtttagtatgaagagatttttaaaaattttttaagagaagttaggaaaattggattaatacgtgaaaaattttgatttgtaaaaattagtaaagagtttaagattttaaatacggaataggttaagttaagtagttgatagttaatgtattatttttgtatatttggaaagttggaatgttttattatttaaggtttatttttaggtataacgggtattaaataaaacgaagttaggcgtttaaaagaaggaattatgtaagttgtttagggaaggtggaaaatttgggtttatgtatggatttttaatggttagggagaagggattttttagaggcgttttaagaatagtattggtggtcgggcggggtggtttacgtttgtaattttagtattttgggaggtcgaggcgggtggattacgacgttaatagatcgagattattttggttaatatggtgaaacgtcgtttttattaaaatataaaaaattagttaggcgtggcggcgcgcgtttgtagttttagttattcgggaggttgaggtaggagaattgtttgaatttgggaggcggaggttgtagtgagttgagatcgcgttattgtattttagtttgggcgatagagcgagatttggtttgaaaaataaaatattagtattggtgaattatgtggggagaagtaaagagggataaaaagaagtttgataaatgaaatagtaaaatggagttaaatgttaaagaattttttttagaaaatttggagatttattaaagaaaaaggttaaatttattattttttttatatatattttagatatttatatagattaattgtttttgtttttttacgtttttgtaaatttttttaaagattgaattttattcgtatagtaaatatttttttatgatttttaagtcgagtgtaagagaaaattttttattagttggtaattttattaaggttttggggatagtgttattataagtattttttttgtaatacgttttgtaattttattgataaaagttttgaaaatatttttgtatattttataagagtcgtttagaagtttgtttttgattattttagtaatttgtttattggtagagtaattttaaagttattttacgaaaatgtggtttaagaaatgtttcgataatagttattaagtgttaattcggtgtaatggaaattttaggttttttaatttttaaatacgaaattttatttattgtttttaaacgatagtttttaatcgtaggtgtatattaaaattatttttggaaatttttaaaaaatagtaatatttattttgtattaggataggttttgatgtaattggtcggaggttgggttttggtgtatttttagtaagatttttaaataagttaattgtgtatttaaagttaagattattgtttttaaaaatttttaaaagggttagttaaatttttggttttcggagtttaggaggaggaaaaggatttttgtttaaggttattttttttgtttttgtagtttaattatgatttagaatagaggttagtaaatttttttgtaaagtgttatataaacggtttttgttgcgtatttttgttttttaaagttttttaaaaatataaaaattatttttagttttagagttgtataaaagcgaagattttttgatttagagcgttgaagtcggaaagcggagagggatgcgaagatattaggcgggtttaggcgtagtcgttattttcgggttgggtttggtattgcgttattcggtgttcgcgggatttttaggaacgagaatacggttaagtaagggacgagtatagtcgttttaggtattacgatagattcgcggcggcggtttaaggattatagagggtagtacgttcgttttcgttttttttcggttcgcggtaattttttttcgcgttttcgttacgcgtaggtttagtttcgcggcggtttcggttttacgtttcgcgttcgggttcgttcggtgatttagtatttgggtatcgtatcgttgggggcgaaggtatcgatcgggcggtacgggtcgggatcgggcgttggattagggcggtttcgaggtttggcgggcgattcgtttttagtaaaggtgcgcggggggacgagcgggtgggagcggtttcgtaaataagttttcgttttagtttttgttttttgttcgaaattgatgatgttttgtattgggtcgtcgttttttagtacgtatacggttttcgtcgttataattcgttaggttacgtcgaggttttggtttcgaggattgtaacggaaattttagacgttgtaggagattacgacgtaaattagtatttcgttttcgcgattattttataggttagattttcgcgtttcgtttattttggttttaaattaatcgtttcgtacgcgtttagttcgttttttgcggtagtttcgggtcgcgagtggtcgggaatgattgggggcggggttaaggggtcgcgtgcgtcggagatttttttcgtttcgtagtcgggaaacgtttagaatttcgaaatgtggagaaaataattttttttttacgggggcgtggttcgtcggttgtagtacgcgaaattggtaaaatgatgtaaatagggtacgttttgaaaatttgaagttattttgtttagaaatgttattagttatgattgagtttggttatagcgttttatttgttatttagtaattgggacgttttaagatggatgtttttgtagtttttatttttttgttttgttttttagttttttgagggtatagaaagtcgttatattttaatttcgggatttattttttttttttttgtaatttttttagtttttagtatagagttttttatttggttggtagaattcggtattttttttatattttttttgtttggtaaggttataattttatagataattaaacggtaattagttggtttttaggtattatttgcgtttttgtttggtttaaaggttataatatttaaggagggtagaatggtgaaataatttatgatgtttttatataataggaatgataaatatgatttattttttaagggaaatattttaaaaatatattgtgaaatgagaaaatagtgtaaattatttttgttcggggcgagggggttgtttgtttgatttttgagatagggtttcgttttgttatttaggttggagtgtagtggcgttattatagtttattgtagtttttattttttgggtttaagttatttttttgttttagttttttaagtatttgggattataggtatgtgttattatatttggttgatttttgtattttgggtatagatggggttttattatgttgtttaggttggttttaaatttttgagtttaagttagttatttatttatttcggttttttaaagtgttgggattatagatatgagttattacgtttagtttagtatttaatattgagtatggtaaaatattgagatttaattgaagtttagtgtgaaataataatagaagttattttagtttcgtttggagtatattattatcgatttatttatttatttattatttacgttatttagatttttagattttaatgtattttttattagagaaatataatttatatttttttattattttttaggaagtatatatatttgtagttttgtttgttgtatttggtagtagtttttagataattcgtatattttaaacggttgtataaatagtgtaaatgttggttaaagggtttttgtttaaggttaaagtttttttgggttttaggaagttcggtagattttagtttattgtaaatttgttaagggattcgtttatagatacgagagagttgttttgggatagtgaattattttttttttgagacggtttaatgatgtttgggtggtgttttcgtaggatggtcgttttgttttgttttttttttggtattattttttatggagaaaagaatgtgttgaagttaagaagatgtttttttcgtaagaatattatttttgttagaataggggtaaggaatttaattttgtgatatttaagagtatttatatttttttaatgtagggtatcgaatgtgggtattatggatattttgggttagatagttttttgttgtggaggttgttttgtatattgtaggatgtttagtagaatttttagtttttatttattagatgttagtaatattttgtttttttttgttaggttgggataattaaaaataattttagacgttgttaaattatttttagttaagaattattgtttttatttatttatgtatttattttgatatggagttttattttgttattaggttggagtgtagtggtgtaattttagtttattgtaattttcgtttgttgggtttaagtgatttttttgttttagtttttcgagtagttgggattataggcgtgtatattatgtttggttaagtttttgtatttttagtagagatggggttttattatgttggttaggttggtttcgaatttttgattttaagtgatttgttagtttcggttttttaaagtgttgggattataggtgtgagttattatattcggttaagaattattgtttagaatattatttgagtattcggattttggaattttttgtttaaagagttttgagtttgtgtataggattttgaataggttatatagggattgttttttgttgagtatattgttagttttgaacgtaggttttgtttagtgttataaggagtaggggtggggaaaggaggaaaggttaggggcgggtaggtagttagttttttattgttatttttttacgtagaattgaaagaagtttaagaattttatattttaatttgttttttaggtttttatgaaggtatatttgttaagataggatgatagagttttggttgtttggaattttggaacgtgggttgaatttggtatatgtaattagtcgggtatggtggtatatttttgtagtttaagttatttgggaggttgaggtaggaggatcgcgtgggtttaggaggttgaggttgtagtgagttgtgatcgtattattgtattttagtttgggtaatagaatgaaattttgttttaataataattattattattatcgtggagtatttaatttaaataaaataaaatagggaaattagatgagagggatttttgtatttgaattttagggtttaaagaagtagaataggtaaattttgttagaaagaagaaaagagagtgagagagaaagagaaagaaagagaaagagagaaagaaaaagaaagagaaagaagaaggaaggagggagggagggaagaaagggaggagggaaggagggaaggaattagagaaagaggagaatgtggtatatgtagatagtttaattttgttaggaatggtgaggaggaatagatgttttaaattagatggcggtacgtgtagatgattaaatcgtttgtaatgtgttattttagtttttttgagagtgaaaatttatgtttggggatttttgtggttaaaaggtgggtaaaaaggtagattagaaatttttttttttttagatggagtgttgttttgtcgttcgggttggagtgcggtggtgtagttttgatttattatagttttatttcgttgggtttaggtaattttttaattttagttttttaagtagttgggattgtagttttaataattttttttagattttagttgtaaattaaaggtattgggtttagatgtagtgtttattaattttggttgtataatagaattatttgggtagttgaaaattaaaataaaaaatattgtgtttaggtttaattatattaaaattttaaaattgtatatttttatattgtaaatatatattttattgttgtaagagttataagaaatttttaatggttatcgatggaagtaggttgtttatttgtgtattttttattacgagaaaaataaatttttatttggttaaatagcgtaattatatttgttatatgtagttaaaagtaatttttaattgatagagaggagaagttattagaggggtgtttatagggagttagaatggtttttggaatagtttagtgggtggattgagagtagatggggtgagatttaaggtagagaggttatttgggagataggataagagtttatttaaggttattattggaagaaagttgggagattacggaaatgtaattataagtttagttatttattagaggtgtatggtgagagagggaaggtaagggtagtttttaggtttttagtttttttggtgttgtttattaaggaaagtaggtttaaggataaagggtttaatttaggatagggtgtatttgaagtgtttgaagaatttataagtgttaggttggaattatttttttggatatgggtttaagttttaggattatttttaagtttggattttattttagaattaatatatagtttatttaacgtttttgttttattttgttttgtttttttgatataagattttattttgttatttaggttggagtgtaacggtatgatttcggtttattgtattttcgattttttggatttaggtgatttttttattttagtttttttagtagttggtgtgttcggaattggtgggtttttggttttattgattttaagaatgaagtcgtggattttcgcggtgagtgttatagtttttaaaggtggcgtgttcggagtttgttttttttgatgtttagatgtgttcggagttttttttttttggtgggtttgtggtttcgttggtttaggagtgaagttgtagattttcgcggtgagtgttatagtttttaaggtagcgcgttttaagttgtttatttttttcggggggttcgtggttttattggttttagtagtgaagttgtagattttcgtggtgagtgttatagtttataaaggtagtgtggatttaaagagtgagtagtagtaagatttattgtaaagaaagataaagtttttatagtatggaaggggatttaagtagtttgttattgttggtttaggtagtttgtttttatttttttatttggttttatttatattttgttgattggtagagtcgagtggtttgttttgatagggcgttgattggtgtgtttataatttttgagttagatataaaggttttttatttttttattagagtagttagatatagagtgtcgattcgtgtatttataaattttgagttagata

SEQ ID NO: 55 - DNA, 8111 bp, Artificial Sequence
  chemically treated genomic DNA (Homo sapiens)
aaatgggtatgttttggggttagatttggaggaatagtagagattggagtgttagaaggtgagtatgtttgggggtgttggggagatgtaatttattagggatagtttagtgttaggggattagattggggtttatgaaggagaggtagaggttgatgggtttaggggtggtgtgggtaggtgagtttttttagatagtgattttgttttgttttttttttagttaggtttttttttttatttttttttttttttttgattggatttttttgggagagttattttttttggttttttttgttttaatttttttattagttggttattattatttattattattttaagttaaatttttagatttatatggggttaggatattggtattggattaaagaggtttttttttttgttttttttttgtttttttaatgttttgttgtaaagatttaggcggggagagagagagagagagagagatagagattgatttatagttagggttagggaattgaggggaattaatttaatttttttttttttaatttattaggtttgtattttgttttttttgtagattagtgttttgttagttatttgggggttaggggatggagtgaaggataagatttttttttattgtagtgaagttatttggagaaatgtgtggaaaatagtaagatttagtgattttttttttattttttttttaattttaggagagattttgtttttttatttatcggtttttagattaattatttatatttatataggcgagagtttttttgaatattggaggtgataggatattaggataaagtataattattgtgttttggtttaattattattttttttgtttggggtcgtcgttggtttttggttgtttttcgtatttttttttatttttattttttttttttttttttttttatttggaatatttttttttttttttttggttttttttgaattgtttttagagttatagattgtggggagtggttattgcgtttttaaggtgaggttttttaagcggggtcgagtttgttttttaattgggagttagtatgatttttgtgtgggttgttttttgttttattgtttttttttttaatttgttaggtgattttgggtttttttgtgttttttttgggttttcggaggattttttggggagatagtttgttttgacgtttttttttttgtagtaagtagtttggggagggaggtgaggataagtgaagttaagttgtttagggggttaagtttatggaagggaagatgttatagagatatatgtggttttgtgattgttgttttgtgttttttttttttttttgaaagtttaggtgattaggtgatttgagtttttaatttggtgataatgtgggtattggttgagtttttaagagtatattgttgtaaatgtcggtgataatatattggggtatgggatttagagttaatttttttaggttatagttaggttatatttttataatgaaggggggaggtgggttatattttttcgttttaatgaaggtagtttaaaaatttttaggttaggttgtaattttagttttatataaaaggaattttgtgtttttatttttttggatttttgggtaaagttttagagggaaatataaataggttgttgtaatatattttgttgggtattattatggaggatagttggtttatgggggtggggggtgtttggggttacggagtgattggtgatggttatttttttttggaatttttttagtttttttttagttttagatttgtttatttgttttttattaagatttgtttttttaggtttgttggtttttttaggggttgaagaaggtcgagttgagaagggatgtaagggagggggttagaatgagtttttagggtttagagtttttattttgttttaagatgtttatagtttgtgtttttggggtgttagaggcgtataaggaggaaagttagtggttttttttttatatttcgtttattagtttagagtatggagtttaggtgaggaggtttgtttgggagggggttttgagttaggaaataaatatttattaattgtataaagattttgtttttgttgttggggagtttgttaagtggtggagataggattagtgtacgaatgatggaaagggagggttggggtgggtgggagttagtttttttttttataagggttttaggatattatatcgatggaattgggggtattggggaggtaatttagtatttttattaaattatagtaatatgtgttgaggatggggttgattaggtaagttttttggagcgttttggttaaattgagggaaattgttgtatttttatttttagtttatgtttttatagaggttatgttagttgtaggttagattttggtaagatttgggtggataattagattgattggttttattttttttataggttttagagttttaattttgttttttggggtagtttggaaatagttaggttagaaattagttaggaatttttttaagttgttttttatatgtaagaatgggatgggggtttttgggagtatttagggaagatgtggagagttggaggaaaagggggtttggaggtaagggaggggattgggggaaggataggggagaagttgtgagtttggagaagtagttaagggattttgagggaatgggggagttgagacgaaatttttatttttatttagaagatgagttatgagtttgggtttgggttgatagaagttttggtttttggtttggtgggagttttgggtagttggtttatagacgttttttagtgttggcgggtaggtttgaattattacgtaggttttggtttttattcgtttttattagttttttggttttagttttttggtaatatttggggttgggggggtagtaggaataagggtttttgtttgtttagttgtttttttttttgggttttgttagattttatagtgtatacgtgggttttaataggttttttttttttttagttattgattaatttcggaattatatagtttttcgtttttagttttataaatttggtgttaaattttttttttttgggaagtatttttggatattttttaaaggattttagttattttagtttgttggttgtcgtttattttgatgtttgtaggttagatgagggttttagatggtatattgttagagggatatattgtggtttttgtgtttagttttgggttttttgtatatgaagtaattttagttttaaatatgtagttgtttgggaggttagaaatagggggtttaggagtaaattttttttattttttttttaaagtttattttttttttagttagagtcggggtgtgtagacggtagttattagggggcgttcggttattatagggaagttgggtgaatggagcgagtagcgttttcgagagtgaggacgtgtgtgtttgtgtgggtgagtgagtgtgtgcgtgtggggttgagggcgttggagcggggagaaggttaggggttattttaggattttaatagatttgtgtgtttttttttttattcgtttttgttcggtttttcgtttttttttgttttttttaatatttttagtaaagagggaacggtttttaggttttgttcgtacgtaattttatttttttgtttttttttcgttaatgtttcgcgggcgcgtgtttttggatagagttttcgggggcggatgggtaatttttaggttgtgaattttggtgggggtcgagttttttttttattgcggcgggttgcgggttaggttttattgagcgttcgtagagttcgggttcgagtcgcgtgtggaagggttgaggttcgtttgttttcgtttttcggggcgggtcgggggcggggtttcggcggggcggagttatgcgttttttttttttttttttaaaagtcggttggtagcggggaggatcgcggaggtttggggtagtcgggtagttcggaggtcgtggcgttgggggttagtattagcgttttgtcgggaggcgtagcggttaggtggatcggttagcggatttatcggttagggcgttcggtgttggaatttgatatttattgattcgggttttattttttttttttttttttaaatatttttttttaaaattgtattgtttttcgttttaatttatttttgtttgttattttttatttgaatcgggtcgacggtttggggagattgttttatttttttaaattattgtggattttggaaattagtagaaagaggaaagaggtagtaagagttttagagagaagtcgaggaagagagagacggggttagagagagcgcgcgggcgtgcgagtagcgaaagcgataggggtaaagtgagtgatttgtttttgggggtgatcgtcggagcgcggcgtgagtttttttttttgggatttcgtagttgattagtcgcgttgacggatagatagatagatatcgtttttagttttagttattatttttttttcggtcggcggcggatagtggacgcggcggcgagtcgcgggtaggggtcggagttcgcgttcggaggcggggtggagggggtcggggttcgcggcgtcgtattgaaatttttcgtttaatttttgggttgttttcgtttcggaggagtcgtggttcgcgcgggggaagtcgagtcgagcggagtcgcgagaagtgttagttcgggtcgggaggagtcgtagtcggaggagggggaggaggaagaagagaaggaagaggagagggggtcgtagtggcgattcggcgttcggaagtcgggtttatggacgggtgaggcggcggtgtgcgtagatagtgttttagtcgcgcgcgttttttaggttttggttcgggtttcgggtcggggaggaagagtagttcgtcgaggcgtcgaggagagcgggtcgttttatagttcgagtcggagagggagcgcgagtcgcgtcggtttcggtcgggttttcgaaattatgaattttttgttgttttgggtgtattggagttttgttttgttgttttatttttattatgttaaggtaagcggtcgtgttttgttggcgtcgcgggtcgttgcgagcgtttttttcggttggggacgtgcgtgcgagcgcgcgcgtgggggtttcgtgttttacgcgggtttatgggtattaggcgtgcggcgtttttttttgtcgttttaggtgtagggggagggggcgcgcgcgttaggtgggagggtattcggagagaggtttatcgtttacgcgggttttgtttatttatcggagttatcgtacgtacgatttgggtcgattagtcgagggcgggagtcggaggaggaggtcgagggggttgggtttgcgttgtcgttgtcggttgaagtttgttttcggtcgttggtttcggacgaattggaagtttgagtagcgggggcgggagttagagattagtgggtagggggtgttcggattttggatcgcgggagggtagagagcgtggagggggtagggcgtaggagggagagggggtttgttgttattgttattcggtttttttagttttcgtcgcgagtttgggaaaagttttggggtggattgttgcggggattttttttttttgttgggttatttgcgtcgcgttaatttcgttcgttttcgttcgcgtttcgttcggtgttcgttttttttcgttcggtcgggtgcgcgcggcgcggagtcgattatattagttcgggtttggtcggtcgcgtgttttcggagtttcggttgttcgaatggggagtttagagtggcgagcggtattttttttttcgttagtttttcgcgggaaggtgatttttcgaggtagttttagttcggggatttagagaattatttttatttttttttattgtttttagattttatttttgtttagtgttaggaggaattttttgacgttttttttttttatttattttttttttagtttggagagaagtttttgttatttcgtttatttttatttttttttgcggagaagatttatttaatttttttttggttttagagtttagggaaaggatgattattgttagaagtcgtggcgcgggagtttattgggcgttttgttatattttatcgaaagtttcgatttggtgatagtgtgttttttttttttcgttaatagtttcgagtgagttgtgttttagttttcgtgggggtgggttaagggaggatttgaagagttattgttttattttatttttttggagaaatggtttgaaatttgttgtgatacgggtagtatgggaatagttttttttgaattttggaaaggagtttttgttagttttgtatatattttgttttggtgaaaggtagttttggagtaggtgtttttttggaattttaaatttgtttatttaatttgtttttgaaagggattttaaagggttttttttcgtttttttttgacgtttttttttagttagaatttttttggagaggaggtaagaggaaagttatggataggggtcgttgttaatatcgtaagttttttagattttggtataaaggttttggttataggtttttaagtagggaggagggggaggagtggttgtttggttatagtgtgatttttagaggtttttagagaaggatatttggtttttgtttgtttagaatcgttttttttgtgttttttggttttggaaggggtatgaaattttcgtttttttttttttttggggtttaggaggagtggagggtttcgggagaatattgttagggggaaggtagggggtgttatgggaatgggtgagggggttgaggtgtagaatttagggggtttttgtaggagtcgtagtggtaagttgtttagttggaagtttggtaattgttgtttttttttgagaggggttttttgtgattttggttgtttttgggagtagggttggggtatttgagtggggtgtatttggggtgtgtgggaaggagagggaaagaaagatggatagtgggatttttttttagtagggtttggtgtttcgtaggttagagtgtttttttgttttgcgagtgttgggcgggaggggagttggtgagagttggagatttttaggaagggttggtagaagtttttttttttgggtgttgttaggttcgtatgttttggcgtgttgatttttatagtttttggcgaggggaggaatgatttgatgcgggtggggagggttagaggaggttttaggtttaaggtggtgtagggggttttttaggggttgggtagtgttaaggtataaaagttttttttggtttttggtggtatttgaaggtgtttaggtgagaggggtttggtatttttttattttgggagggagaagaaattagggaataggtaggagtgggagataggtgaggttttggaaatttattgaggttttggagagatttgtgtagagaggaaaatgtggtttttttttagggtttttttttgggtttttattttttaagtaatttgtgggtatgttgggttatttttaaggattagaagagtttggatgggggagggtggttggtgtttttcggttttcggtattttttttcgtttttaatattagtttattttggtatttgttatgttagtaggagaaggttattatgttgtttttttcgtttttagttttttttttttgttttagtttaaatttgtttttttatttgattttaatatttattatggttttggattagggaattagggggatagtgagagtagggagagggaagtgtggggaaggtataggggatttcgatagtgaagtattttggggttttttttttgtatttcgagttttttagtttttaatatttggttagtttttaattttttcgggtttataattatagtagtttaggagtggtgggtatattttgtgttcgtggggattttcggttgtgttttgttcgatttagaagatttggagaagttagaggttgttggtgggagggaagtgaggagggaggaggggttgggtggttgggtttgtgtattttagtttttgtttatgtttatgttttgttttttttttgtttttagt

SEQ ID NO: 56 - DNA, 8111 bp, Artificial Sequence
  chemically treated genomic DNA (Homo sapiens)
attgaggatagaaagagagtaaggtatgggtatgggtaggggttggggtgtataggtttagttatttagttttttttttttttttattttttttttattaatagtttttggtttttttaagttttttgagtcgaataggatataatcgggggtttttacgggtatagaatatgtttattatttttggattgttatggttatgaattcgaggaagttaaagattaattagatgttgggggttggggagttcgaaatgtaggaggaaaattttagaatgttttattgtcgaggttttttgtattttttttatatttttttttttttgtttttattatttttttagttttttggtttaaagttatggtaagtattaaggttaaataggaggataaatttggattggggtaggaaggaaggattaggggcgagaaaaataatatggtgatttttttttgttgatatgataaatattagggtgagttggtgttggagacggaggggggtgtcgaggatcgaagggtattaattatttttttttatttaagtttttttagtttttaggaataatttagtatgtttataggttgtttagagggtaaaaatttaggaggagattttgggggagaattatatttttttttttatataaatttttttagagttttaatagatttttaaagttttatttgttttttatttttatttgttttttggtttttttttttttttagggtgaggaggtgttaagttttttttatttgggtatttttaaatgttattagggattagggaaggtttttatgttttggtattgtttagtttttagggggttttttgtattattttaggtttgaggttttttttaattttttttattcgtattagattattttttttttcgttagaagttgtgaaggttaatacgttaagatatgcggatttgatagtatttaaaaggaaaggtttttgttagttttttttgggggtttttagtttttattaatttttttttcgtttagtattcgtagagtagaggggtattttagtttacggaatattagattttgttaggggagagttttattgtttattttttttttttttttttttttatatattttaaatgtattttatttaggtattttagttttgtttttagagatagttaaggttataggaagttttttttaagagaaaataatagttattaggtttttagttggatagtttattattgcggtttttgtagggattttttggattttgtattttagtttttttatttatttttatgatattttttgttttttttttgataatattttttcgggattttttattttttttgggttttaaggaggaaaggggacggaaattttatattttttttaaggttagggggtataggaggggcggttttaggtaggtaggggttaggtgtttttttttgggggtttttgaaggttatattgtggttaggtagttattttttttttttttttttatttggaggtttgtagttaaggtttttgtgttagggtttgaggaatttgcggtgttagtagcgatttttgtttatggttttttttttgttttttttttaagggaattttggttgagggaaggcgttagagaggagcggaaagggattttttagagttttttttagaagtaagttgggtgggtaggtttggagttttaaaaaaatatttgttttagggttgttttttattaggataaagtgtgtgtaaggttggtaggagtttttttttagggtttaggaaggattatttttatgttgttcgtgttatagtaaattttaagttatttttttaaaagggtaaagtggggtaatgattttttaaatttttttttgatttatttttacgagagttaaagtatagtttattcggaattgttggcgagggaagggaagtatattgttattaagtcgggattttcggtggaatgtgataaagcgtttagtgggttttcgcgttacgatttttgatagtgattattttttttttggattttggggttagaaaggggttagatggatttttttcgtagagagaaatgaaaataagcggggtgataggggtttttttttaggttaaaaaggaaatgggtgaagagaaggggcgttaggaaattttttttagtattgggtagaggtagggtttggagatagtaggaaggggtagggatggttttttggattttcgggttggggttatttcgagaggttattttttcgcggagggttggcggggggaggggtgtcgttcgttattttgggttttttattcgggtagtcgaggtttcgggaatacgcggtcggttaggttcgggttgatgtaatcggtttcgcgtcgcgcgtattcggtcgggcgggggagggcgggtatcgagcgggacgcgagcggggacgggcggggttggcgcggcgtaggtggtttagtagggagggggggttttcgtagtaatttattttaaaattttttttaaattcgcggcgagggttgaagagatcgagtggtagtgatagtaagtttttttttttttttgcgttttgttttttttacgttttttgttttttcgcggtttaaggttcgagtattttttgtttattggtttttggttttcgttttcgttgtttagatttttagttcgttcgggattagcggtcgggagtaaattttagtcggtagcggtaacgtaagtttagttttttcggttttttttttcggttttcgttttcggttggtcggtttagatcgtacgtgcggtgatttcggtgggtgggtagggttcgcgtgggcggtgagttttttttcgggtatttttttatttagcgcgcgcgttttttttttttgtatttaagacgatagagggggacgtcgtacgtttggtgtttatggattcgcgtggggtacggagtttttacgcgcgcgttcgtacgtacgtttttagtcgggagaggcgttcgtagcggttcgcggcgttagtagggtacgatcgtttattttggtatggtggaggtagagtagtaaggtaaggttttaatgtatttaagatagtagaaagtttatggtttcggaggttcgatcggggtcggcgcggttcgcgtttttttttcggttcgggttgtggggcggttcgtttttttcggcgtttcggcgagttatttttttttttcggttcgaggttcgggttagggtttggggagcgcgcgcggttggagtattgtttgcgtatatcgtcgttttattcgtttatgagttcggttttcgagcgtcgagtcgttattgcggttttttttttttttttttttttttttttttttttttttttttcggttgcggtttttttcggttcgagttagtatttttcgcggtttcgttcggttcggtttttttcgcgcggattacggttttttcgaagcgagaatagtttagaagttggacgaaaagttttagtgcgacgtcgcgagtttcgattttttttatttcgttttcgggcgcgggtttcggtttttgttcgcggttcgtcgtcgcgtttattgttcgtcgtcggtcggggaggaggtggtagttggggttgggggcggtgtttgtttgtttgttcgttagcgcgattggttagttgcgggattttaagggggagggtttacgtcgcgtttcggcggttatttttaaaagtaggttatttattttgtttttgtcgttttcgttgttcgtacgttcgcgcgttttttttgatttcgtttttttttttttcgatttttttttggagtttttgttattttttttttttttttgttggtttttaaaatttatagtgatttggggaagtagagtaatttttttaagtcgtcggttcgatttaagtggggaatggtaagtaaaaataaattaaaacgagaaataatatagttttaaaaaaaaatgtttaagaaaaaagaagagggataaaattcggattaatgaatattaaattttagtatcgagcgttttggtcggtgagttcgttgatcggtttatttaatcgttgcgtttttcgatagagcgttggtgttagtttttagcgttacgattttcgagttattcggttgttttaagttttcgcgatttttttcgttattagtcgatttttaaaaaaaaaaggggggggcgtatggtttcgtttcgtcgggatttcgttttcggttcgtttcggggggcggggataggcgagttttagtttttttatacgcggttcgggttcgggttttgcggacgtttagtgaagtttggttcgtagttcgtcgtaatgaaggggaagttcgatttttattaaggtttatagtttgaaaattatttattcgttttcggaaattttgtttagagatacgcgttcgcggggtattggcgaggagggagtaggaaagtgaggttacgtgcggatagggtttgagagtcgttttttttttgttaggaatattgaagggggtaggggaaggcggagagtcggatagggacgggtggggagagggatatatagatttattggaattttggagtgatttttggtttttttttcgttttaacgtttttaattttatacgtatatatttatttatttatatagatatatacgtttttattttcgaagacgttgttcgttttatttatttagtttttttgtggtggtcgagcgttttttagtgattgtcgtttgtatatttcggttttggttaaagagggaatgggttttggaaagggggtggggggagtttgtttttggattttttatttttgattttttaaatagttatatatttgggattggagttgttttatgtatagagagtttagggttgggtataggggttatagtgtgtttttttgataatgtgttatttggagtttttatttggtttgtagatattaaagtgagcggtagttaataggttggagtgattggggttttttgggaagtgtttagggatgttttttaggggagaagaatttggtattaagtttgtggagttgagaacgggaagttgtgtggtttcggggttagttagtgattgggagggaagaggatttgttggagtttacgtatgtattgtggagtttggtaaaatttaaagggggaggtagttgggtagatagaggtttttgtttttgttgtttttttaattttagatgttgttagggaattgaggttagggggttggtgggggcgggtggaggttagggtttgcgtgatgatttaaatttattcgttagtattaaggaacgtttgtaggttagttgtttagagtttttattaggttaggggttaaggtttttattagtttaagtttagatttatagtttattttttgaatagaaatgggggtttcgttttagtttttttatttttttaggattttttggttatttttttaggtttatagttttttttttattttttttttagtttttttttttatttttaagttttttttttttttaattttttatattttttttaagtgtttttaaaggtttttattttatttttgtatataggaagtagtttggaaaaatttttggttggtttttgatttggttatttttaggttgttttagggaataaagttggggttttgaggtttgtgggaagagtgggattagttagtttgattatttatttagattttgttagggtttggtttatagttggtatagtttttgtggaggtatggattgagaatgggaatgtagtaattttttttaatttaattaaaacgttttagggagtttatttagttagttttatttttagtatatgttgttgtggtttggtggaggtgttaggttatttttttagtatttttagttttatcggtatggtgttttaaggtttttatgaggaaaagggttggtttttatttattttaattttttttttttattattcgtgtattagttttgtttttattatttggtaggttttttagtagtagggataaggtttttgtatagttagtaaatgtttattttttggtttagggtttttttttaggtaggtttttttatttgggttttatgttttaggttgatgaacgggatatggaagggaagttattaatttttttttttgtgcgtttttagtattttaggagtataagttgtagatattttggggtaggatggaggttttgagttttaagggtttattttggtttttttttttgtatttttttttaattcggttttttttagtttttaaaagagttaatagatttgaaagagtaggttttagtaaaaaataaataaataaatttgaagttaagaggaggttggaggggttttaaggagggatagttattattagttatttcgtggttttaggtattttttatttttataagttaattgttttttatggtggtatttagtaaggtgtgttataataatttgtttgtgtttttttttggggttttgtttagggatttaggggagtgagggtatagaattttttttatataaggttaggattataatttggtttaggggtttttgagttatttttattagggcgagaaagtatggtttattttttttttttattgtggagatataatttggttgtgatttggaggggttaattttggattttatgttttagtgtgttgttatcggtatttataataatgtatttttaaggatttagttagtgtttatattgttattaaattaaaagtttaagttatttagttatttgagtttttaaaaaaggggaaaaagtataaaataataattataagattatatgtatttttgtggtatttttttttttatgggtttagttttttgaataatttgattttatttatttttatttttttttttaggttgtttgttgtaggggaaggggcgttagagtagattgtttttttaaagaatttttcgaaggtttagagagggtataaaggggtttagggttatttagtagattgggggaaggggtagtgaagtagagagtagtttatatagaggttatgttggtttttagttgaggggtaaattcggtttcgtttggagggttttattttgggagcgtagtggttattttttatagtttgtggttttgaaggtagtttagaaggagttaaggaggaaggggaaggtgttttaggtgagggggaaggggagaaaggggtgggggtggagaaaagtgcgaaaggtagttaggagttagcggcggttttagataaagaaagtagtgattgggttaaggtataatagttgtattttgttttgatgttttgttatttttaatatttagggaaattttcgtttgtgtgggtgtgggtggttaatttagaagtcggtggatgaagggataaaattttttttgagattggaaagaaggtgaggagagagttattgggttttgttgttttttatatatttttttaagtggttttattgtaatggaaggaggttttgttttttattttattttttgatttttaggtgattagtaggatattgatttgtaggaagggtaggatataaatttggtgaattgaaggagagagaattgggttggttttttttaattttttgattttgattgtgggttaatttttgttttttttttttttttttttttttcgtttaggtttttgtaataaagtattaaaaagataaagagaaagtaaaggaaagggtttttttggtttagtgttaatgttttagttttatgtggatttggaggtttgatttgaggtaatgataagtaatgatggttaattgataaaaagattggagtagaggaagttaaggagggtaatttttttaagaggatttagttaggaaagggggaaggaatggggaagaggatttagttggagagagggtagggtagagttattgtttggggaagtttatttatttatattatttttaggtttattagtttttgttttttttttatgggttttagtttaattttttgatattaagttgtttttgatgaattgtatttttttaatatttttaggtatgtttattttttgatattttaatttttgttatttttttaagtttgattttaaaatatgtttattt

SEQ ID NO: 57 - DNA, 3001 bp, Artificial Sequence
  chemically treated genomic DNA (Homo sapiens)
tatttatggttaggaataaataaaatttagttttttttttaagaaggaggaagtattaaattttaaataagagtaggaatagtatttagaaggagaaatataatattttggaaaaagtaagtagaattaatatagtttatttaaatgtgagatttaaatcgtagtaataggaaatttttttattaaattggaattttttttaatttttgtgtaagatttaaataattaaaatgtattttaatggttattgatggttttattttttttttttttttttttttttttttttttttttttttaaagaaatagatttgagtttttttattggagtagaaatatatgaattttttttaattatttaggaaattggaagtttttgggtggatatggtttttttttattgtttttttttttttatattatttttagttaaaaaaattaattgtttttagtagagggatttttgttagaaatttttattaggtgaatttgtattgggaatttttatgtttttttagtttgtttgtgttttttaaatagagttgaagttgtaaataaagtggaaaaatatattttttattttaaaatttttaaaattttattttttgtggaaaatataattttataatattaatttttaaaatttgtaagagttatagaaggtgtgaaagtagttaaatagtcggtttagaaatttaaaagttaggattaacgggggatagaatgttttttttttaaatttaggtagggatggggagtatttttagtattagggtatttatggacgttataaggggaaaggatgtatttgaacggtgggggtgatttagcgatgaatcgttacgttaatagtattattgttaaatttttaaatttagaggttttggtgaaaaattaaatcggtggtaatttttaacgtttgtagtatttgttattttatattttagtattcggagtttggatagtttcgtaggtcgcgtttcggaggtagtatgagtttttattaatttatttatagttttattgttaacggtagttagatttaggagagatttattgaaaattttttaagatttttttttaaaaataaaacgatttttatatttaatggtttatttgaaagaatatacgtaagaaattaggagatttaaattaaatttattaataggagagtttgatgatgtttaattttagagattagagtttcgattggtgaggtttgatgaaaaagtaaagagaaatcgtaattgtatagttaaaaatataatttttgttatttttaaaattttaaaaattttttatttgtttttgggaaatgggtgaaattgaaaattattaaaataattggattttttaaaaattggattgtatgagtgaaaggtgtttatgagaagtcgatgatttcggattttattatttaagaggatagtatagaatagttaatatgttttttgagggattaggatgttgacgtttttttttgatattcgattattacgtgattgagaaaaaaaaaaaggaagttattttatgaataaaaatcggagcgtaatagtgtaataaaatattttgtatttaaaggtaataggtaggtagatgttgataaagagggttttttaaaaattatgttcggatagatttttgcgaattgtatagataaataggagtagaaggtcggttatttttgtaattagcggtagtagtagtagaagtcgtagttttagaggtagtcggagagatttcggagtagagaaggcgtcgtcgattttcgcggttgtttggttcgcggtttttataaaggcgggttagtcgttcgtttttttttttgttttttttttttttttttttgatttttttttttttttttaatcgtttgttttttttttcgggtggatttacggttattttgttttttcgcgttttattttatcgtttttttttttttttttttgtttttttttttgcgttttttttttttcgtgttacgtttttttttggttttgcgcgtttataaatttttgagtagaatacgagtttcggtaaacgagtttcgtagttttttttgttgttttcgttggtttttgcggtttttgtttagatattaacgttagacggcgatgtttttcgggtggtgattttagcgtaggaatttgaagaagcgttttgttcgtcgttttatttggtagtttttttggtagcgggaggagttgaagggtaagggagggaaaattttattaaagcgatcggtttattcgattgttgattttttcgtttggcgtcgcgttaggggagttagtttttttttagtcgggtttggttagttattgggcgtcgggtagatgtatatatatatatttttttttaattatagtaagtaagaagtggtagggcgcgtatcggttgtcgttaagtgttgtttaatttagggagtcggggtttcgtttcgtttttttttcggtttttagagttttttggggttggagggtgggaggttaggggcgtttttatagttgtgtgtttttttttttattttgcgtagaatgattatgtgtagcggagcgaggttggttttgttggtttatgggataattatgtatagtagcgtttatagtttatttgtcgtcgtcggatttcggtttttcgggattaggtaggtgttggttgtttggtttaagtaggagttggggttttttaggtatagacgtttttttacggttttttttttgtagttttttgggtttagattattagtatcgttttttgcgttttcggtgcgttttcgttagtttcggttggatagcgggtttttattttagtcgagggtttggtaggtttcgcgattgttcggacgttttttttagttttaggtagtttagggtttcgggtagagttagtgagtttttggtcgttggagaatttttttttttttaattcggtttataggatgggggtagggtacggtttttagtttggttttttttatttatttttgggacgagtt

SEQ ID NO: 58 - DNA, 3001 bp, Artificial Sequence
  chemically treated genomic DNA (Homo sapiens)
aattcgttttaagaataggtaaaagaaattaagttaggggtcgtgttttgtttttattttgtgggtcgggttgggggagggggggttttttagcggttagaagtttattggttttattcgggattttgagttgtttagggttgggggaggcgttcgagtagtcgcggagtttgttagattttcggttagaatggggattcgttgtttagtcgaggttggcggaggcgtatcgggggcgtagagggcgatgttagtagtttggatttaaaggattgtaggaaggagatcgtgaggaagcgtttgtgtttggggagttttagtttttgtttgggttaggtagttagtatttatttgatttcggggaatcggagttcggcggcggtaggtgagttgtagacgttgttgtgtatgattattttatagattagtagggttagtttcgtttcgttatatatggttattttgcgtaggatgggaaagaggatatatagttgtgagaacgtttttggttttttattttttaattttaaaaagttttggaagtcgggggagggacggagcgaagtttcggttttttgagttgaatagtatttggcgatagtcggtgcgcgttttgttattttttgtttgttatagttagaaaaaaatatatatatatgtatttattcggcgtttaataattagttagattcggttgaaggaaagttaatttttttgacgcgacgttaagcgaaagaattagtagtcgagtgagtcggtcgttttggtaagatttttttttttttattttttaatttttttcgttgttaggagagttgttaggtaggacggcgggtaaagcgtttttttaagtttttgcgttggagttattattcgagaggtatcgtcgtttggcgttggtgtttgagtagaagtcgtaggaattagcgggagtagtaggaggagttgcgggattcgtttgtcgaggttcgtgttttgtttaaaagtttgtagacgcgtagaattaggagggagcgtgatacggagagaagggggcgtagagagagaggtagaagaaagaaagagggggcgatgaggtgaagcgcggaggagtaaggtggtcgtaagtttattcggaggaagaagtaggcgattaagggaaagagggaaagttagaaaagaaggggaggaaggtaagggagagggcgggcggttagttcgtttttgtaggagtcgcgggttaggtagtcgcgagggtcggcggcgttttttttgtttcgaggttttttcggttgtttttgaagttgcggtttttgttgttgttatcgttggttatagaggtgatcggttttttgtttttatttatttgtgtagttcgtaaaaatttattcgaatatggtttttggagagttttttttgttaatatttgtttgtttgttgtttttaagtatagaatattttgttgtattgttgcgtttcgatttttatttatgaaatgatttttttttttttttttttagttacgtaatgatcgggtattagaaaaagacgttagtattttagttttttaaggaatatattaattattttgtgttgtttttttggatgataagattcggagttatcgattttttataaatattttttatttatataatttaatttttaagaagtttaattgttttgatggtttttaattttatttattttttaaggataggtaaagaatttttagaattttgaggatgataaaagttatgtttttaattatataattacgatttttttttatttttttattaagttttattaatcggagttttggtttttggaattaagtattattaagtttttttattaataaatttaatttagattttttaattttttgcgtatgtttttttagatagattattaaatgtggaagtcgttttgtttttaaagggaagttttggaggatttttagtaaattttttttgagtttggttgtcgttgatagtagggttatgagtagattgatgagagtttatgttgttttcggagcgcggtttgcggagttgtttagatttcgggtgttgaagtgtagggtaatagatgttataaacgttgaaaattgttatcggtttaattttttattagagtttttaaatttgaagatttggtagtagtgttattaacgtggcgatttatcgttaaattatttttatcgtttagatatattttttttttttgtagcgtttataaatgttttaatgttgagaatgttttttatttttgtttggatttgaggaaaaagtattttgtttttcgttagttttggtttttggatttttagatcggttgtttggttatttttatattttttgtggtttttatagattttaaaaattgatgttgtgaaattgtgttttttataagaagtgaaattttaagaattttggggtgagaaatatgtttttttattttgtttataattttagttttgtttgggagatatagatagattgggaaagtatgagggtttttagtataagtttatttgatgaaggtttttaataggaatttttttgttggaaatagttaatttttttaattgaaaatgatgtgggaagaggaaagtaataagggaagattatatttatttagaggtttttaattttttgggtaattgaagaaggtttatatatttttattttagtaagagaatttaggtttatttttttaaaaaaaaaaaaaagaagaagaagaaagaaagaaagaaaatagagttattaataattattagagtgtattttaattatttggattttatataaaaattaggggaaattttagtttagtgggagggttttttgttattacgatttggattttatatttaaataagttatattagttttgtttgttttttttaagatattatatttttttttttaaatgttgtttttgtttttatttgagatttaatatttttttttttttaaaaaaaaaattaagttttgtttatttttggttatgaatg

SEQ ID NO: 59 - DNA, 7001 bp, Artificial Sequence
  chemically treated genomic DNA (Homo sapiens)
tattgttttgttttgttttttagttaataatatattatgagtatatttttattttattaaatatttttttataaagttattttgatggttgtatattattttattttatgaatgtattatattaatttattttttggtgtgggttatttgattttataattttatttttagaataatgaaatatttgtgaagttttagaaaatattggtgtttgggttttaattttatagattttgatttaattggtttgggttatagattaggtattgggaatttaaaaagtttttttagtgattttaatgtgtagttaagatcgggaatttttgtagatagggatgataggaggtgagttatttttagtatttattatttagtattaatattattattttgagttgttaagtgaatgatgtatttgatttattttataaagatatatgtgtaaataaaattattataggatttggtttattagggtttgtgttttaagttttttatgttaagttatatatcgtatattaaatattttaaaatgtattttattgatatatatattaagtgaaaagtgtttttgagttaaataatgatagtataattattaagtaatgataatttgaaatgaatttattattttgtaatttagggataagttatttttttgaattttttgtattttgagagtatttgttatatttgtaagatgaagagtttgaattggttagataatgttttgtgtgtttggtatatgataggtatttaatagttttaaagaattaatgtatttagatgaattgtatattaaatttgttgttttttttttatggttttattaatttaatttgagagaaattaattattttgtaatttagggataagttatgtttttgaatattttgtagtttgaggagaatatttgttatatttgtaaaataaaataagtttgtaagttttttttttttgttttaaagagttttgtgtttttgaatataaaatataaataatcgttatgttgttaattattggtaaatgttttatttttaatttaaggaaatattataaagtaatagatatattaataaaaggttattagttaataggtattgtttgaaaagagtataaaagaattttagtatgattttttatattgtgtttttattattgttaataataaaataattagtaattatgaagtgggtggaattaatttttttaatttttttattaaattttattgaatttagaatattgtatagaaatgaatatggaataggtgagatattttgtgttttttttgttttttttttatattaaaattttttaaattataaaatttgtattaatttgttttgatttattatttatatttattattttatatggagaaaaaatatttaattgatggatatatttaaatgaaagaaaaatttgtaattttataagaggtttataaagttatagtagtgtttaatggatgaatggtttgtatgttttatgttgaattaatttttatattttaatggtatgtatattaattttgaaaaattatatatatatatatatatgtatatatatatgaatataaataaaattttatatgtgaagaagttagaattatgtttttttatataatttttttagattagtaaaatagataaaatttttgtttttaatatagaaaaatgggttattatttgatggtttgaagaagaaatattgtgattgggatatgaatggtaaatcgtagtataattatgtttaaaagaatgtttgaaatatatttttaattatttgatttttaggatagttatagtattatagtatagggaaaaattaaataattggaagataaaatttggattttagtgataggtttattataaattatgtttgttaattttattttttagttttttagtttttttttttttaagtataaaattaagatgtttaggttatttttaatgtttttttaattttgaaattgtatagttttaattgaaatataaatatttatatgtaataatgattatttttttggttgtagttgaaaatacgttttatgaagtttattttgttttttagtttttatattggatttttattaatgtattgtagagataagtttagttgatttgtaagttttgtttatataaatgtattttaaatgtgtaaagtaaggataagtaaatatttaaataaaattgggtatttttgtgagtttttaaaagtataaaagtaatttggataattttaagaaaagttatttatattgaatattaatttgatgttgaagaggttaaattgttgattaatgttttcgatattgattttttgattttttgaaattttatgagttaaattaaattagattttagaaattgaagattagtgtttgattagtgataattatatattaatttaggaattttttttattagtattaatagggtgatattataatgtttttttttttgtatattatttaaattttagtagtaaattataggtgataaaatattttatttgttgttatttgtggagagtatgttagttttttggatgtttttttattttatattttaaaaatttttaataaagaatttaaagtagtgtgttgttgttattttttgtatatttaaatttgtataaggattgttttgagttaatttatgagtattgtagttttgggttttagattttgattatattgggaatagatattgttagaggtttgtttaattattaatttttttttgtttaaatttaaaagtaattataaagaatatagatatttttaattatgggtatattatagtagatggatggttatagaaggagaaattatttttatgggaaatttatttattttagtttttaatatttatatgtatatttatggtaaaagaaaataagaaaaagattaaagtttttttttagatgatttggaagttaattttatataattttataaattaaatgtttaaatagattataatataaatagaaaataaaataaataaatgaaaaattatatttgagaaaaataagtttgttgtaggtttgttttttaaggatttatacgtatttttgttttagggttattatattttttgtttagtttgtttaagaagttatttataaggaagtaagtaaaatggtgaaagatgtattgattgtaattgagaaatttattggagatgaatagtttttagggtgtttagaaaattaggtgagtgaataattttaaaaaagtattgtgatatttgataaaaatttagtatgttgaagagaagatataaaaatagtagtgaaaaatgtatttaaatatttgaagagttattgtatgaaagagggattagatttattttgaattgttaaagagggtagaagagaataataggtagttattataaagagattatataaatatgatgaattaaggttttgaaataagattattttgatgattatgggtatattaatttttttgagttttagtttttttatttgtaaaataagggatgataatagtttttattttatagttagtatggaaattgatataatagtaatagtagttaatttttattatatatataatgtgattggtattattttagggagtataatgtgtatattgataataaaaatattttatgatataggggatagatagtattgatgaattagaatggttgtttagtgagttaagagatgttggttcgggtttttgggtaggatattagttttgtttatttatatttatttattaaatatttaaaataatttttgaagatagatgttaattttttaattgaggaagttgaggtttagagaatttaagtaatttttttatgggaattattaaatggtagagttaggatttgaattagattatttggtttaaaattgatagttttagtagttttattatattataattatagtgaatgtaagatgtatagtatatcgttagggttgttaggtttagtaaataataataaaatataatatttagtttaatttgaattttagataaatattaaatattttttttagtataaggatattttattgtagaagtttaataaataatatttattatttattttattttaatatagaaataaatttgataatgattagaattttttaattataaaataatatgtttagagaatattttgttatggtggggttaattaggtggttgaaagataatgtatttggaatattatagaagagatgtttttttaaggatatagtttaagttttttttaattttgaaatttatgaattgataaaaatttttgttttgtatttttatttttgttttgttttgataatttttttaaaatgtgtataaaaaaataagaatatattatttattgtaattttataattaattagaggtttaaggtaatgttatagatcgttgatttatttttgtaaatttaaaggtatgttttttaaatgaggattgggaattagaaattttacgtaagttttttaggattttttaaatattattgtagtagttataaaagttatataaaagtttttttagatatatgaaatatatgtattttttagatgttttttgtggaatattgatgttgttatttgagtttggtaagggtaagttatagaggaggaaatatatatattttaaaatattttagttaaatatgtaattgtggttaagaaaagtgtttttttaaaaaataattattttattttaaaattatttttatttataattgaaaataatatgtagttttttattgttttgtaaggatggtatgtaaaatgagtatttatgtttgaaatgtggtatgtttgtgtgtgtgtgtgtatatgtatatatgtatgtatatattataatatatatatatgtatttgtaattttaaaagttatatttttaatgagaattatgaaaatattattttgtttagtttttttttttatttaaatttaaatttaaagttttggtgtatacgggtaggatgagtaggtttgttatataggtaaatacgtggtatggtggtttgttgtatttattaatttgttgtttgggtattaagtttagcgtgtattatttattttttttaatgttttttttttttgtattttattttttgataggttttagtgtgtgttgtttttttttttgtgtttatgaaatatggtttatatatttataaaagtttatatattttagtttaaatttttgataatataaaaaggaaaaataaaataatttaaaattgggaaagagaaataaaagattgtatggtttttttttttttattgtttggatattaaagttttattttttataaggtagtaaagaaatttattttattaggttgaaataaaatatattagaatttgtatggaaaattttttagaatttatagttttgattttagatattagaaaatgttttatgtgttttatagatttttaaagtaaagttagttgtttttttttaaatataaaatattttttatagttatttgtttttttggaagaattttgttatgagaaagaaattttggagaagtacggatatttagattgttgtagttaaagtgaagagggaagatataattgtttttttgtatataaaaagtttattttagtatcgattttatttttttaagttttagaatttgttataagttgtgaagtatatgaagaagatagggagatatttatgaataagtaaggatttagtttaaaggtagatgtaaattttagaaatatagtaatggtaagtttaatttagtatttttgtaatgtatttatgtatttttagtaagaggtataatgtttttttggtgttgtgtttgttgaggttttaggtaaggtaattaggagagtaatatttaatgtaatttggtttttatagtacgttagatgtagtataaattataggataaatttattagaggttttattagttttttgagagatatatattttttttttttttttttatttattttatttttaattttattttgtttaagaatatattagtattgtattaaattgatgttttttagagttatatattggtgttttgtgtttatttaattgtttagaaataaaagttagagatttaagtatggttaagtatggttaagatatatagatatggtaaaggtttattgaatatttaggatgttgtggggtcgggcgcggtggtttacgtttgtaattttagtattttgggaggtcgaggcgggcggattacgaggttaggagatcgagattattttggttaatatggtgaaatttcgtttttattaaaaatataaaaaaaattagtcgggcgtgatggtgggcgtttgtagttttagttattcgggaggttgaggtaggagaatggcgtgaattttggaggcggagtttgtagtgagtcgagattgcgttattgtattttcgtttgggttatagagcgagatttcgttttaaaaaaaaaaaaaaaaaaaaaggatgttgtggaaatatgtttgtttgtatagaggattagattaatatttataaataaattttgaagttttttttttttttttttttttatttttttttttttttttattttgttgataggaaattgaaggttggaaggttaaaataattggttaagggtatatagttagtatatttgattttaggtttttttgttggagaagtttgtacgtaattttttaattatttttgttttttatgttattttttaaattagataaatagagagattgtttttagaatatttttgttatggcgattatttaggtgtataattttattttgtattgataagggataaaatgtttatttttttgttgtatttagtagaagtttggttttgttgatttttgaaatatatttgagtaggtttattgaaaaagattttttaataagaattatggttagtatgtttgtttattttttttttataatagaatttggtattatttgttagata

SEQ ID NO: 60 - DNA, 7001 bp, Artificial Sequence
  chemically treated genomic DNA (Homo sapiens)
tatttgatagatggtattagattttattatgagaagaaaataggtagatatgttaattatgatttttattaaaaggttttttttaataagtttatttagatatgttttagggattagtaaagttagatttttgttaagtgtaatagaaagatggatattttattttttgttagtgtagaatggggttatgtatttggatagtcgttatagtagagatgttttaagggtaatttttttatttatttggtttaggaagtaatatggaaggtagaagtgattgaagagttacgtataggtttttttaatagaagaatttggggttaaatgtattagttgtgtgtttttagttagttgttttagttttttaatttttaattttttattaataaaatgggggaaagaagaagaatgaagaggaagaggagaaggaggttttaaagtttgtttgtgagtgttaatttgattttttgtgtaagtagatatgtttttataatattttttttttttttttttttttttgagacggagtttcgttttgtggtttaggcgggagtgtagtggcgtaatttcggtttattgtaagtttcgtttttagggtttacgttatttttttgttttagtttttcgagtagttgggattataggcgtttattattacgttcggttaattttttttgtatttttagtagagacggggttttattatgttagttaggatggtttcgattttttgatttcgtgattcgttcgtttcggttttttaaagtgttgggattataagcgtgagttatcgcgttcggttttataatattttaagtgtttagtaaatttttgttatgtttgtgtattttgattatgtttgattatgtttggatttttaatttttatttttaggtaattaggtgaatataaaatattaatatatggttttggaaagtattaatttggtgtaatattaatatatttttgaataaggtaaaattgagagtagaatgggtaaaaagaaaaaaaaaaggtgtatattttttaagggattaatggaatttttggtaggtttgttttgtggtttgtattatatttagcgtgttatggaaattaagttatattgaatgttgtttttttaattattttgtttgggattttagtagatataatattaaagaaatattatattttttattgggagtatatgagtatattgtaaaaatattaaattaggtttgttattgttgtgtttttgaggtttgtatttatttttaaattggatttttatttgtttatgaatgtttttttgttttttttatatgttttatagtttgtgataggttttggaatttggaaaagtgggatcgatgttggagtgggttttttgtgtgtaagaaaatagttatgttttttttttttattttggttgtagtagtttgaatgttcgtatttttttaaaattttttttttatggtaaagtttttttagaaaggtaggtagttataagaaatattttatgtttggagaaagataattaattttgttttaaaaatttataagatatatgaaatattttttaatgtttaaaattagaattatagattttgaaaaattttttatataaattttaatgtattttgttttagtttgatgaaatagatttttttgttgttttatggaaaatgagattttaatgtttaaataataaaaggaaaaaagttatgtaattttttgttttttttttttaattttgaattattttattttttttttttgtgttattaaaaatttggattaggatatataaatttttataaatatataaattatgttttatggatatagggagggaaatagtatatattggggtttgttagggagtggagtgtagggagggagagtattaggaaaaataggtaatgtacgttgggtttaatatttaggtaataggttggtaggtgtagtaaattattatgttacgtgtttatttatgtaatagatttgtttattttgttcgtgtatattagaattttaaatttaaatttaaataaaaaaagaaattgagtaaaataatatttttatgatttttattaaagatgtaatttttggaattgtaaatatatatgtatatattatggtatatatatatatatatatatatatatatatatatatagatatattatattttagatataaatgtttattttatatgttatttttataagataataaaaaattgtatattatttttaattataaataaaaatgattttgaaatgaaataattattttttaaaaaaatattttttttggttataattatatatttagttaaaatgttttaaaatgtatgtgtttttttttttgtgatttatttttattaaatttagatgatagtattaatattttatagaaagtatttgaggaatatatgtgttttatgtatttgagggaatttttatgtagtttttatagttgttatagtaatatttagagaattttggaaggtttacgtaagatttttaatttttaatttttatttaaaagatatatttttgaatttataagaataaattagcgatttgtaatattattttgaatttttaattggttgtaaagttgtaatagataatgtatttttgtttttttatatatattttgaaaagattattagaataagataaaaatagagatgtaaaatagaaatttttgttaatttataaattttaaagttggaaagaatttaaattatatttttaaaggagtattttttttatgatattttaggtatattgttttttagttatttaattaattttattataatagagtattttttgggtatgttgttttataattggagagttttaattattattaagtttgtttttatgttgagataaaataaataataaatattatttgttgagtttttataatgaaatatttttatattaagaaaagtatttagtgtttatttaaaatttagattgaattgggtattatgttttgttgttgtttgttaaatttggtaattttaacgatgtgttatgtattttatatttattatagttatagtgtaatgaagttattaagattgttaattttaagttagatggtttagtttaaattttggttttgttatttggtggtttttataagaaagttatttaaattttttgagttttagtttttttagttggaagattagtatttatttttaaggattattttaaatgtttaataaataaatataggtaagtaaagttgatattttgtttagaagttcgagttagtattttttgatttattggataattattttgatttattagtgttatttattttttatgttataaaatatttttattattaatatatatattatgttttttagaataatgttagttatattgtgtgtataataaaagttagttattattgttgttatattaatttttatgttaattatgaaatgggagttattattattttttattttatagataagaaaattgaagtttaaaaaagttaatatgtttatagttattaagataattttattttagaattttagtttattatatttatatggtttttttataataattatttattgtttttttttgttttttttagtaatttagaatgaatttaattttttttttatataatagttttttaaatatttaaatgtattttttattgttatttttgtattttttttttagtatgttaaatttttgttaaatattataatgtttttttaaaattatttatttatttggttttttaaatattttgaagattgtttatttttagtgggttttttaattgtagttaatgtattttttattattttgtttatttttttgtaagtggttttttgaataaattgggtaaaaaatatggtagttttgaaataaaaatacgtgtgaatttttaaggaatagatttgtagtaagtttattttttttaagtatagttttttatttgtttgttttgttttttatttatgttgtaatttgtttagatatttgatttgtaaaattatgtaaaattagtttttaggttatttgagaagaaattttagttttttttttgtttttttttgttataaatatatatatagatgttaaaggttaaaataagtggattttttataagagtggtttttttttttgtgattatttatttattgtaatgtatttataattgagggtatttatattttttatggttatttttaaatttaagtaaaaaaaaattggtaattagatagatttttaatagtgtttatttttagtatgattaaggtttaaaatttaagattatagtgtttatggattgatttaaagtaatttttatgtaggtttggatgtgtaaggagtaatagtaatatattattttaaattttttgttagaaatttttaaaatgtggaatggaaagatatttaagagattaatatattttttataaataatagtaaatagaatattttattatttatggtttgttgttaagatttaaatagtatatagaaaagaaaatattataatattattttgttggtattgatgagaaaaatttttgaattagtatatggttgttattgattagatattaatttttagtttttaaaatttgatttggtttgatttatgagattttaaggaattaaaaggttaatgtcgaagatattagttaatagtttaatttttttaatattaagttgatatttagtatgagtaattttttttgaaattgtttaaattgtttttgtgtttttaagagtttataggggtatttaattttatttaagtatttatttatttttgttttatatatttaaagtatatttatataagtaaaatttataggttagttaaatttatttttgtagtatattggtaagaatttaatatggaagttggaaggtaaaataaattttatgaaacgtgtttttaattgtaattaagaaagtaattattgttatatatgaatgtttgtgttttagttagaattgtatagttttagaattaaaagaatattagggataatttaagtattttaattttatatttgaggaaaagaaaattaggaaattaaggaatgaagttaataagtataatttatagtagatttattattaaaatttagattttgttttttagttgtttggtttttttttgtattgtagtgttgtaattgttttgaaagttaaatggttaaaaatatattttaggtatttttttgaatatagttgtattacggtttgttatttatattttagttataatattttttttttagattattaaataatgatttatttttttgtattaaaaataaagattttatttattttattagtttgagggagttatgtgaaggagtataattttggtttttttatatataaaattttatttatatttatatatatgtatatatatgtgtatatatataattttttaaagttaatatgtatattattgaagtgtaaaaattaatttaatatgaaatatataaattatttatttattaaatattgttataattttgtaaattttttgtaaagttataagttttttttttatttaaatatatttattagttaaatattttttttttatgtggaataataaatatgaataataaattaagataaattaatgtaaattttataatttaaaaaattttgatatagagaaaagataagaaaaatataaaatattttatttattttatatttatttttatgtagtgttttggatttagtaaaatttagtaggaaaattaaaaaaattgattttatttattttatggttgttagttattttgttattggtagtggtggaagtataatatggaaaattatgttgaaatttttttatattttttttaggtaatgtttgttaattagtaattttttgttggtatatttgttattttatggtatttttttaggttgaaaatgggatatttgttaataattaatagtatagcggttatttgtattttatgtttaaggatatagagttttttggggtagaaaaaaaaaatttgtaaatttattttattttgtaaatataataaatattttttttaaattatagaatatttaaagatatgatttgtttttaagttgtagaataattaattttttttaaattaagttaatgaagttataaagaaaagatagtagatttggtatgtaatttatttaaatatattaattttttaaaattattaaatgtttattatatgttaggtatataagatattgtttgattaatttagattttttattttgtaaatataataaatatttttaaagtataaaaaatttagagagatgatttgtttttaagttgtagaataataaatttattttaaattattattgtttgataattatgttgttattgtttagtttagaaatattttttatttaatatgtatgttaataaggtatattttaaagtatttagtatgcgatgtatggtttaatatagaaaatttagagtataagttttaataaattaagttttataataattttatttgtatatgtgtttttataaagtgggttaggtgtattatttatttagtaatttaagatgatgatgttaatattaaatgatggatgttaagagtggtttattttttattatttttgtttataagggttttcgattttggttatatattagaattattgggggaattttttgaatttttaatgtttagtttgtaatttagattagttaaattagaatttgtggagttgagatttaggtattagtattttttaaagttttataggtgttttattattttaaaggtaagattataaaattaaataatttatattaggaaataaattaatatggtatatttataaagtagggtgatatatagttattaaaataattttgtggaagaatatttaatgaaatggaaatatgtttataatatattgttaattgaaaaataggataaaataata

SEQ ID NO: 61 - DNA, 2001 bp, Artificial Sequence
  chemically treated genomic DNA (Homo sapiens)
agtttttgaataaaaataaatattgttaaattgtttttaaggaaggttttttaatttatttttttattagtaatataggagagcgtgtggtttatattaataaaaagaattttgttgttttgagtagtattaagcggagcgtttaaatttatatttttttgattaggaaggttgatattcgtttttgtaatttatattttttttttattgaattgtttgtttttattttttgttcgtttttttatagggatattattttatttttttagtgttgtttttataaaataaataatttttttgtttgttttttttttcgagacggaattttgtttagttgtttaggttggagtgtagtggcgcgatttcggttttttgtaatttcggtttttcgggtttaagcgatttttttgttttagttttttaagtagttgggattataggtacgcgttattattatgttcggttaatttttgtatttttagtagagacggggttttattatgttggttaggttgatttcgaatttttgattttaggtgattcgttcgtttcggttttttaaagtgttgggattataggcgtgagttattgtattcggtttaataaatgttttagaaagttatttggatgatagtttatgattgttgaatatcggttgaggtttataaaattgcgtttatcgtttggggattttttagtcggtttttattttttatggaaagcggtttttttataaatttttacggtgggaattattgtaaaggtatcggttttttcggtttcgaatatttcgcgggattttagttgtttttgggtattttttttagcgtaattattaattttaatatgtaacgcgtttcgtggtttaagtattcgaatgaaggttcggggttaaagttatgtgtttgattgcgttatacgtttcgttattttttttacgtttttttttttagcgtatattttggtcgttattttgtgcgcgaggttatggaatttttgagtttcgttaattttatggtcgagcgttttagggatcggttaatcgtaatttagatttcgtaggaaagtttcgtttttattcgtatggaggcgggaattgttacgaagtttttgtggagggagaggaagtagttgcggaaagttaataagagtggggaatcgatgacgttaattaatggggacgcggggatattacggttaatgagaatggagaaggtttaggatacgtgggtgggggaagttgagggttgagattaagggttaaagttgggaggtgagtttgttattttgagtcgggcgagcgttgtgggttaagtaggggttgtagggtagtaggagtgtaggtgatttggggtcgggagttagtaataggtagggttgtgggttgcgtagtgtggaggggtatttttttttagtgttgggagaggttatggtaatttagatatggttttattaatgaatgttaattattaacggtaatgaacgattgattgtttcggttggggcgggtcggggattgttgtgtaagatgggtaggattttgcgcgatatttgtttagtattcgtttttagttttttcgagagattattttttttcgtaatattttttttttggggtttgggtatatttttttgattttcgatttttatgattttgttttgaagatttattgttttgtttttttgatttttaatgttttttttagttggggtacggtgtaaggaagagcgtggtttagggaggacggacgggggtgaaggggacgattaaaggtcgttattataagtaaataattagggttttagtgggattattattattattttttttttttttgtagattgaaaaaatgtagatcgtcggggtattatttatttttttagttttggtaaggtgtcgcgtcgcggtgttttgtagtattaggtgtatggtgtggacgttattagtgtttaatgaatgaatttaggggagtttggcgttttgatgatgtaggttttttg

SEQ ID NO: 62 - DNA, 2001 bp, Artificial Sequence
  chemically treated genomic DNA (Homo sapiens)
taaagagtttatattattaggacgttaagtttttttgggtttatttattaaatattgatggcgtttatattatatatttggtattatagagtatcgcggcgcggtattttattagagttggagaaatgaataatgtttcggcggtttgtatttttttagtttgtagagggggaaaaaatagtaataataattttattgagattttggttgtttgtttataatgacgatttttggtcgttttttttattttcgttcgttttttttagattacgtttttttttgtatcgtgttttagttgaggagggtattagaggttagagggatagagtagtgggtttttaaagtaaagttatggagatcggaagttaaggaaatgtgtttaagttttaggaaggaaatgttgcgaaagggaatggtttttcgggaagattggaggcggatattgggtaggtgtcgcgtaggattttgtttattttatatagtagttttcgattcgttttagtcgaggtagttaatcgtttattatcgttggtaattaatatttattgataaggttatatttagattgttatagttttttttagtattggggggaaatatttttttatattgcgtagtttataattttgtttattgttggttttcggttttaagttatttgtatttttattgttttgtaatttttgtttggtttatagcgttcgttcggtttaaggtgatagatttattttttagttttagtttttggttttagtttttagttttttttatttacgtgttttggattttttttatttttattggtcgtaatattttcgcgtttttattggttgacgttatcgattttttatttttattggtttttcgtagttgttttttttttttttataggagtttcgtggtaattttcgtttttatgcggatagaggcggggtttttttacgagatttggattacgattggtcgatttttgaaacgttcgattatagagttggcgggatttagaggttttataatttcgcgtataagatggcgattaaggtgtacgttgaagaaaaaggcgtgggagagatgacgggacgtgtgacgtagttagatatatgattttggtttcgagtttttattcgggtgtttgggttacggggcgcgttgtatgttgggattggtagttgcgttgaggggggtgtttaaggatagttgagatttcgcgagatattcgaggtcgggagagtcgatgtttttgtagtaatttttatcgtggaggtttgtggaaagatcgttttttatggagagtaaaggtcggttggaaagtttttaagcggtgagcgtagttttgtggattttagtcggtgtttagtagttatggattattatttagatggttttttaaaatatttgttgggtcgggtgtagtggtttacgtttgtaattttagtattttgggaggtcgaggcgggcggattatttgaggttaggagttcgagattagtttgattagtatggtgaaatttcgtttttattaagaatataaaaattagtcgggtatggtggtggcgcgtgtttgtaattttagttatttgggaggttgaggtaggagaatcgtttgaattcgggaggtcgaggttgtagggagtcgagatcgcgttattgtattttagtttgggtaattgagtaggatttcgtttcgggggaaaaaataaataaaaaaattgtttattttgtaaaaataatattgaaagaatgaaataatatttttatagaaaaacgagtaaaggataggaataggtaatttagtaaggaagaaatatgaattgtaggaacgaatgttagtttttttaattaaagaaatataagtttaaacgtttcgtttagtattgtttaaaatagtagagttttttttattaatgtgagttatacgtttttttatattgttggtgagaggatgaattagaaaattttttttgaaagtagtttggtaatatttatttttatttaaaggtt

SEQ ID NO: 63 - DNA, 1451 bp, Artificial Sequence
  chemically treated genomic DNA (Homo sapiens)
tagaaatagggttttattaggtttcgaatttttgggtttaagtaatttgtttgtttcggttttttaaagtgttgggattataggtgtgagttatagtgtttggttaaatattttattttttagattataagatgtttaattttatttttggtaaaaagttgatttagtaaattagggttttaagtgaagtcggttggggtttgaatttttgatatttgtttagggtggaagatatagtagttgtatttatgggttatttggggtgtagggtgattagttggaggttgtgagtttttttgttttttgaaatgtttgtacggggtatttaggaagggttggggattgggtgaggaggtgtggatagaatgttttttggaaattgttttaggggtagtttgagtggtttgagttgtgtttgttttattgaaggttggagttttagagaaaagtttttatggacggatttattttttagaattgttgtttttgcgggagaatatttttttttaggtgttgtttttagggtagtagggaagattgggaaaaattgaggggtaagagttgttggaggggggagttatatttattgagtgtttattatatgtcgggtgttgttgaaggtttgcgggttttataggatttttttttagatttttatatttttgtagattatacgtcgtttatagatgattttgaatttagaagggttgtttaggtttagggtttagttagtgagtggatgggtagaattagatttgttttggaagggtttgttttattttggcgtttaaaatgtgttttttattttttgttattaggataagtaaattcgagtattttttcgttaggggtttaagtttattatgggtttgatttttaaggttatattttcgtttttttatttgatagataggaaatttttgaaatgtttttcgtacgtgtaagacgttttcgcggtggcgggcgatagagggcgtatagtgggatcgtagtacgagttcggagtatttttagagtcggcgatttttgttttcgtttttgtcggtcggttttttcggggtttaggagggtagtatcgtcgggtttcgcgttatgatattagttttggagtggtgtagtgtgtaaagtttattggttggcgtggttcgggatacgttttcgcggagcggaataaaacggcgcgtaggtcgggcgtatttagtcgttattttcgagagcgtttgtcgtttttgcgtcgtcgagttagttgttaggtgagtgcgttttgagtcgcgcggttttgttcggcgcggaggggcgtttgggtacgtatttagcgtttttcggttttgttagtttcgtcgtagtttcggggttgtcgtaggcggggaattgtgagaagtgatcgtagttagttcgggtagtgttgtttttttttggaggtattaggttcgtttttatttcgggttttt

SEQ ID NO: 64 - DNA, 1451 bp, Artificial Sequence
  chemically treated genomic DNA (Homo sapiens)
gaaggttcgggatggggacggatttagtgtttttagaaaagagtagtattgttcgggttaattgcggttattttttatagtttttcgtttgcgatagtttcggggttgcggcggggttggtaagatcgggaggcgttgagtgcgtgtttaggcgttttttcgcgtcgggtagagtcgcgcgatttagggcgtatttatttggtagttggttcggcggcgtaggggcggtaggcgttttcggaagtggcggttgggtgcgttcggtttgcgcgtcgttttgtttcgtttcgcggaagcgtgtttcgggttacgttaattagtgggttttgtatattgtattattttagggttgatgttatggcgcgaagttcggcggtgttgtttttttaggtttcgggaaggtcggtcggtaggggcgggggtaggagtcgtcgattttgggggtgtttcgagttcgtgttgcggttttattgtgcgttttttgtcgttcgttatcgcgaaaacgttttgtacgtgcgaggggtattttaggagttttttgtttgttaggtgagaaggcggagatatgattttagaggttagatttatgataaatttgagtttttaacgaaagggtgttcgaatttatttgttttggtggtagagggtgagggatatattttgggcgttagggtaagatagatttttttagggtaggtttgattttgtttatttatttattagttgggttttgggtttagatagtttttttgggtttagggttatttgtgaacggcgtgtaatttatagggatgtgagggtttaaaaggagattttgtaggattcgtagatttttagtagtattcggtatgtaatagatatttaataaatgtaatttttttttttaatagtttttgttttttagttttttttagttttttttgttattttaaggataatatttggaaaaaggtgttttttcgtaaaagtagtagttttgaaaagtgggttcgtttatagaggtttttttttggggttttaatttttagtaggatagatatagtttaggttatttaagttgtttttggggtagtttttaggggatattttgtttatatttttttatttagtttttagttttttttgagtgtttcgtgtaggtattttagggagtagagaagtttatagtttttagttggttattttatattttaggtggtttatagatgtagttgttatgttttttattttgggtaggtgttaagggtttaggttttaatcggttttatttaaagttttggtttgttgaattaattttttgttaggaataaagttaagtattttatgatttagaaaatgaagtatttggttaggtattgtggtttatatttgtaattttaatattttgggaggtcgaggtaggtagattgtttaaatttaggagttcgagatttggtgaaattttgttttta

SEQ ID NO: 65 - DNA, 771 bp, Artificial Sequence
  chemically treated genomic DNA (Homo sapiens)
tgtcggtaaatttgttgatttaggttttacgagggagtaagtaatattggatttttttcggtatttcgagaatggggtgggggcgtttttaaaggatttttttttttttttagtgtttgtttttgttttcggttcgttttttgttaagatttggggatttttagggtttggagggaaagttttttgggacgattatagagcgttagtattgaattagtttggagagcgcggaaggaaagggtcggttcgtagagggcgcggggaaggtagggtggggacgcggtggagttcgcgttcgtttgttgaaggtttggaagtgtagcgtagaagatagagggtgattaggaagacgcgcgaacggggttggtcggtcggcgggtgggggaggggaggcgggggaaggcggttgagtgggtttttggagtgtgtgtgtttgtgttagtgtgtgtgtgtgtgtgtgtatgtgtgtgtttggcgtttggttagggtgattttttataaattatatgttttttagtttttttttaaaaggttgtgtcgagggttggttagtgaggttcggttcggggaaagtgaaagtttgtttgggttttttcggcgttagagtcgtttttcgtattttaggatagcggtgcggttttcggtcggggcgtttatttcgtagtagttagcgagcgagcgagcgagcgagggcggtcgacgcgttcggtcgggatttagttgttcgtatgatcgcgtcgggcgtcgtcgggcgttgtttttttacggtaa

SEQ ID NO: 66 - DNA, 771 bp, Artificial Sequence
  chemically treated genomic DNA (Homo sapiens)
ttatcgtgggagggtagcgttcggcggcgttcggcgcggttatacgggtagttgggtttcggtcgggcgcgtcggtcgttttcgttcgttcgttcgttcgttggttgttgcggagtgggcgtttcggtcgagggtcgtatcgttgttttgggatgcggagagcggttttggcgtcgagaggatttaggtaaatttttatttttttcgggtcgagttttattggttagttttcggtatagttttttaagagaggattggggggtatgtggtttatgggaaattattttggttaggcgttagatatatatatatatatatatatatatatattgatatagatatatatattttagaggtttatttagtcgttttttttcgtttttttttttttattcgtcggtcggttagtttcgttcgcgcgtttttttagttattttttgttttttgcgttgtatttttaagtttttagtaaacgagcgcgggttttatcgcgtttttattttgtttttttcgcgttttttgcggatcgatttttttttttcgcgttttttaggttgatttagtgttagcgttttatgatcgttttaagggattttttttttaggttttgaaaatttttaaattttagtagaaaacggatcgagagtagggataagtattgggaagggagggaaattttttgaagacgtttttattttattttcggagtgtcgaaaggagtttagtgttatttgttttttcgtggagtttgagttagtaggtttgtcggta

SEQ ID NO: 67 - DNA, 2580 bp, Artificial Sequence
  chemically treated genomic DNA (Homo sapiens)
gaattcgagtttataagtttttttaaaaaaaattgatttaagtaaattttgggaagagtttttttgttatataatttaaggttttaaggttttcggatttatatattttataaatgaattagttagtttgtttaaatgtagggaaattgtgggaagaatgttttttttatttaatttaaggttttaaggtttttttaattaattttattagttaattagttaattatttaaaaataaaagtttgaaattgttaaaaaaaaaagataaggaaaaggaaagaaagaaagttattagtttgtttggtatataatatttaattgttgtttgatttacgtgtgggttttagatgtagatttttagtttttagttttttagagattgatattaggtttgttatacggtttaaaatgatgagtatatttatgaattttaattttatttttttttagatttttttggttaagaaattatgtagtttgtatgaagtaggtatttaaaatatatttgatgatttaatttttattggagaagaaatatttatatatgtttttttatttttatatgttttaaatatgtaaagattaaataaatatttttagaagtatttaaattttttaaagtaaatttattttaattagtaataggatttttttaatattggaaagttgagtgtgatcgtatttagtggtgataagtgtgagtttgtttggggagagggtaggatatttaggattttttaagtttagagttaatataataaagattattgagtgtttatttgggtgggttataattattgtttataggagtttatgaattataagtaaaagagtgaggagatatgattagtttataaataatttttaatatagagtagaaagtaatgaattattgtaatggagttattatagtgttaaggatgtttagagggtatttttgataggtagaggtgagggttagggaaggaagttgtagtttagttagttagagttgttggaatagatatgataatgttgttgttaaattgtttttttttttgaggatagaatgtttcgtgtaagtggtttggtggaagggattagtgttttaatatagggtgatttataagtaggaaagtgtgttttagaaatttagattagagtgatagattgaattggattatgggggatttatttgaatgttatttattgtattgtttttgcgattagtgttagtaaagtgttaaagggattgagtagatgagtgatattatgtaatataagttttgagttttatttgttagattgattggagaggggtttggttagttataggaaggtaatttggtatgtagttattatttttgagttgatgtaagtttttttgtatggagagttggttttttttattttgtgggaaaagagaataaaggagtatgggagtgtttaagggaaggagaaataaagggtagagaggtagcggtggtgttagggaagtttataggagttaatagtagggttgttttaatttagagaggaagcgatttggtgttttcggttttgtggttttttttatttaataatattttttattttataataatgttagggaaggcggaggttggtatagtgtattaagatatagttatttttgggtgatagaggtttagggtagtttattaagtaggtagaagtttttgatatatattttgagagataaagtaagattttgtattttaatttttagaattttttttattatttattatagtttcggagttatatagtttttattattttattataattttagaatattagagaatatattattttatttaattattttttattatatgtgaaaaaaatgaaggatatgggggaagtgtgatttgttttaaattatatattttatggtagagttaggttttttgtttgttatattagtgttttttttgttataattattttgaagaatttattttttagtaagaaaatatttttatggagagtagttggaaaatagttgagagatggaggggaggttgggggtgtggagaggggaaggggtaagtgtatagattcgttgaaggggggagaaaaggtcgtggggatgaagttagaaggtagaagggtttgttgggtttggtatgaaggagtatgagtttattgagttttttttggtttttttatgttagtaatgtacgtggtttagtttgttgtggtattggttagtagtcgaggtatcgttagttttgtgtgtgagtatgtatttttaggtaaagttattgaggttcgggtgatagtgtttcggtaggttgatagttaggtgattgaagtttgtgcggtaatttatatgatggggaatgagttgatttttttagatgattttatttgtacgggtatttttagtggaaattaagtgaattttattatttaaggattgagggttatggatacgggattttatatttgtaaggtggagtttatgtatttatcgttatattatttgggtataggtaacggagtttagatttatgtaattggtgagtaaagttattttattgagttgatatttgttgtattgtagttttttatgtat

SEQ ID NO: 68 - DNA, 2580 bp, Artificial Sequence
  chemically treated genomic DNA (Homo sapiens)
gtgtatagaagattgtaatgtaataggtgttaatttagtgaaatggttttgtttattaattatataaatttgggtttcgttgtttatgtttaggtagtatggcggtgggtatatgagttttattttgtagatgtagagtttcgtgtttatggtttttagtttttggatagtgaggtttatttgatttttattggaggtgttcgtgtagatggaattatttaggaaggttaatttattttttattatgtaggttgtcgtatagattttagttatttggttgttagtttgtcgaagtattgttattcggattttagtggttttgtttggagatgtatatttatatataaagttggcgatgtttcggttgttggttagtattatagtaggttgggttacgtgtattgttagtatggaaaagttaaagggaatttagtgaatttatgtttttttatgttaagtttagtaagtttttttgttttttagttttatttttacggtttttttttttttttttaacgaatttatatatttatttttttttttttttatatttttagttttttttttattttttaattgttttttagttattttttataaagatatttttttattgagaaatagattttttaagatggttgtggtaggaagaatattgatatgataaatagaagatttggttttattatgaaatatgtgatttggggtaagttatattttttttatgttttttattttttttatatatagtaagagataattagatgagatgatatgttttttggtattttaaggttatgatagaatgataggagttatatagtttcggaattataatgagtggtaggggaaattttgaaggttgaggtatagaattttgttttattttttaaagtatatgttaaaaatttttgtttatttagtgagttgttttgaatttttgttatttaggagtagttgtgttttgatgtattgtattagttttcgttttttttggtattgttgtagagtggaagatgttgttagatgaaggaagttatagagtcgagggtattaggtcgttttttttttaggttgaggtaattttgttgttaatttttgtgggtttttttgatattatcgttgtttttttgttttttattttttttttttttgaatatttttatgtttttttgttttttttttttataggataaaggagattagttttttatatagagaggtttgtattaatttaaaaatagtggttgtatgttaaattatttttttgtaattaattaggtttttttttagttagtttgataagtgaaatttaaaatttgtgttgtatgatgttatttatttgtttaatttttttgatattttattaatattgatcgtaaaaataatataataaataatatttaaatgagttttttatgatttaatttaatttattattttggtttgaatttttaggatatatttttttgtttataaattattttatattagagtattagttttttttattaagttatttgtacgggatattttgtttttagaagagaaaatagtttggtagtagtattgttatgtttattttagtagttttagttagttagattatagtttttttttttaatttttatttttgtttattagagatgttttttgagtatttttagtattgtgataattttattgtagtagtttattattttttgttttgtattaaagattatttgtgagttaattatatttttttatttttttatttgtggtttatgaatttttgtgagtagtgattatagtttatttaagtgagtatttaataatttttattgtattgattttaagtttaagaaattttaaatgttttgttttttttttaagtaagtttatatttattattattaaatgcggttatatttaattttttagtattgggagggttttgttattggttgagataaatttattttaggaaatttaaatatttttaagagtgtttatttaatttttatatatttaaaatatgtaaaaataagaaaatatatatgaatattttttttttagtaaaaattaaattattaaatatgttttgagtatttattttatataaattatatggttttttagttaagaaggtttagagagagataaggttgagatttatggatatatttattattttaagtcgtgtaataaatttggtgttagtttttgaagagttgaaaattgaggatttgtatttgaaatttatacgtaggttaggtaataattaagtattgtatgttaaatagattggtggttttttttttttttttttttttgttttttttttttggtaattttaaatttttatttttaaataattggttaattagttagtagaattgattaagagaattttaaaattttgaattaagtaaagaaggtattttttttataatttttttatatttaaataagttggttaatttatttataaagtatatgaattcgaggattttaaaattttgaattgtatagtaaaaaaattttttttaggatttgtttaagttaattttttttaaaggaatttgtgagttcgaattt

SEQ ID NO: 69 - DNA, 5001 bp, Artificial Sequence
  chemically treated genomic DNA (Homo sapiens)
aagtttaaaagataattgttttagtatttaatttaaaaaatataaattagttagatatagtggtgtgtatttgtagtcggagttatttaggagattgagataagaggattatttgagtttaagggtttgagattagtttgggtaatagcgagatttagtttaaaaaaagaaaaaaaaacgttaataataataaaaaaatttattcgtttattaaattatttgtaaggcgtttgaatgaaaggtgttttttttattgtggttttgtttagggtatttatagttgtaggtgagttaatttgtttggttttgttttttttaggtttgtttttttatgatttatttgtgtgagaaaattatttttacgttgtttttttggaggaagtttaatggatttaattagttgatgtcgttgtagtagtttgtgtacgacgtgtaggattagttgaattttttggttagcgaggaggattttaggcgtattgtttagtagttttatagtataggcgaggtgagtttttgggagtttaggtagggggtcgtgagaggtgttagggatttagtttgttttaaattttagtttttggaagtggtgtgagtttggggaagtagtgtggaaatggtttagttaatttataatatttttatacgtgtgataaatatagttttaagtgacgttttgaattgtagttttcggtttattttaggagttgttattttgttttgtcgtgttttgtttttatttttagagtttgttagtttgggagtgtagtgtttattgttttgggtgattgggtttttttttattttttttgggtattaggaatttaatttgttatttttggtagtttttaggatggtttttttgtattagcgtggagttattagttttatatagattttttgggtgggaaaatagttgagaaaaggtagtgaggtgtttttgtggaggtaatgtttggagatataaagatagagaattttggtgtatagatatatagagtaattataattaaagatgtatattaaaaaattttagtaagtaatgtttagtagaaatgattgagaatgggaggttttgttttggttttgtgatattgagtattagggcgcggtttggaaattttgttttaatggtattatatgtttgttttaggaacgggggtagtgttttcgtgtttttttattatgtgaaattgggagtttatatgaattagtgtgggttaagaagagcggttttgaatattgtaattaaaagtagttttgagattattaaaagttagatgtttatttttttaattttaggtgttaggtttggttttatagttagtttgtatgagttatataaattttttgaaattaaatttgaatttataagttagtgattttgaaaattggagtcgtcgggtagtaattttattagtttttaaatttttagttaaatggttagagaatttgttaatttatttaggaatattttaaagtgattgaatttaaggaagaatataggtgaaggattatattttagatgataagatattgttggatgtaaaaaatgtgttaattttaattttaaatttttttggtataggagttttttgttttttagtagtagattagtaattttttagattatattatatagttttttttatttgttattatatttttgtttgtttttgagagtttagtaagtaaatgaagatgtaaagaaggagggtaattaggtagtaggaattatattgtgtggttcgattttgattggtttcgggttttttttagatttgtttttcgtatttaatttgtagatttttagaattttttagtggtttttttgattttgttttttggtttagggttttatattacgtttagttgattgttttagttttttgtttttttttattatgggatagtttcgttttttttgagtttgaggcgatgagtagtgtttaggattaaattgtaaatggtattttagtaaatgttgtattaggaattagattaatattggttttgttttttagaatttttaatttaggtttaattttgaatagatttttagatagggggtattttttaggtttaagttagattgtggtaggaaattattgtgtggtttcggtggggttagagtttttaagtgagggagtttagggcgatggttattttttaagaaaggaagtagaatttttttataaagggaaagttttttttgttttttgttattttttttttttttttttttatttttttaagaaataaatataattaaaaagttaaagtttttttgggttattatttttggttttatttttttttttttttttcggaggttaattattattatggtagtatatttttttaggttttttttatgtgtgtgtgttaaatatttatataatggtataataatagaatgttttgatttttttttgaaaatgtttttaagtttttagagaagttgtaaggatagtattatgaatttttatataggttatatttatttatttttttaattaattaattaatttttttttttttttttttgagatagagttttattttgttgttaaggttggagtgtagtggtataatttcggtttattgtagttttcgttttttgggtttaagtgattttgttttagtttatagatataagttattatatttaattaaattttgtatttttagaagagatagggttttattatgttggttaggttggttttaaatttttgattttaagtgatttattcgtttcggttttttaaagtgttgggattataggtatgagttacggtgtttagtttattatatttaagttgattagttgttgatattttgttatatttgttcgattttttttttttttatttatttatttatttattttgtagatatgatgatattttttttttaaataatttagtttatattttttaaggagaaggatatttttttatataatttaatataattgatgattttagaaatataatattaatatagtattatgattgaatatattatttttatataagggtttgttattggttttaataattttttttaaagttatttttatttatgtatttattttgggatttagaatttagtttaaaattatttattgtatttggttgttattttttatttttttttttttttttatttcgttggtttttttgaagattttaggggagttgttttttagaatttttattttgatatttttaagttgtttttttttattcggtgtttggtttttgagacgtatttacgtggaatggttttgggttattttttagagtatttgtttagtttttgttgtcggtattaggttttttagtgttttaagtggttggtgtatttggttagggttttgtttttaagcgtgattttttgttgttttttcgtagattaatattatgtaaagtgaaatagtttaggacgtgttgtttttggattttcgttggttttgtataaacgttttggggaagttgttgttcgtggagattttacgggcgttgtattattatcggggtcgttatatcgtggaggatatttagcgtttggtgttcgatagcgacgtggaggagttgttgtagattttcgatgttatggatatttgcgttcgggatttgagtagcgggattatggtggacgttttagttttgattaagatagataatttgtatcgtttttgggttgatgaggaggacgaggtgatggtgtatggtggcgtgcgtatcgtgttcgtggaatattttattttttttttatgtggtattttttataaggtttaggtgaatttgtgtcggtggatttattagtaaagtatagagggcgacgcggatattcgtttgtgggtgaatggttgtaagttggttaatcgtggggtcgagttgttggtgttgttggttaattacggttagggtattgaggtttaggttcgcggtttggagacggagaagattaagtgttgtttgttgttggattcggtgtgtagtattattgagaacgttatggttattacgttgttagggtttttgatcgtgaagtattatttgagtttttagtagttgcgggagtattatgagttcgttatgatttattagttacgggatttttttcgggtatagattttgaaggaaattttattgattaatattatgggggggtataaggaaagttttagtagtattatgtgtttcgggtgttacgacgtttatttataggttagtttcggtatggatatttatgtattagatttgaatttttttattcggaggaaattgagtcgtttgttggattcgttcgattttttggggaaggattggtgttttttcgttatgaatttaggtttttttgatttcgtggtaaagtataatattagtaacggggtttttaaggattttttttttagttttttttacgttttgttgcgggaatggattatttattttgagagtatagtgggtatttttatgtttaaattgagggagttgggtcgtcgggatgtcgtagattttttgttgaaggtattttttgtgtttaaaattaatttggatggtaatggttaggaggtttatgtttcgagttgtaatagcggtattttttataattttattagttttgttgtatttcggtgagggtagtttttggtttgggtagggtttgtttggattgtagaagtaagggggtgatgtagtttatttttttttttggagatgttgagggtgtttttttttgtatttatagttagggggatgttattttttttttcggtttgatttgtttttttgtcgttattttttttttcgttttatttcgttgtttgtggatggttattgtagtttaagagtagaatagattttttattttggtcgtttgaaaagttagtgtatttttttttagtgttttggattttattttttattttttagtattttgttttttattgataattttgttggaatttttaattttttaatgatattt

SEQ ID NO: 70 - DNA, 5001 bp, Artificial Sequence
  chemically treated genomic DNA (Homo sapiens)
aaatgttattgaaaagttaggaattttagtaaaattattagtaagaagtaaggtattggaggatgagagatggagtttaaaatattgagaggaggtatattagttttttaagcggttaaagtaaaagatttgttttgtttttaaattgtaatgattatttatagataacggaatgagacggggagggaggtagcggtagagaaataggttaagtcggagggaggagtggtatttttttggttgtgggtgtaggaagaaatatttttagtatttttaaagggaaggatgggttatattatttttttgtttttgtagtttaaatagattttgtttaagttagaggttgtttttatcgggatataatagagttaatggaattgtaagaggtgtcgttgttgtagttcgaggtataggttttttggttattgttatttaggttgattttgaatatagaggatgtttttagtaaaaagtttgcggtatttcggcgatttagtttttttagtttggatatgagggtgtttattgtgtttttagggtaggtggtttattttcgtagtagggcgtggagggggttggggaggaaatttttgggagtttcgttattggtgttgtattttgttacgaggttagggaggtttaagtttatggcgagaaggtattagtttttttttagggggtcgggcgggtttagtaggcgatttagtttttttcgagtgaggaggtttaggtttgatgtatggatgtttatgtcgaggttggtttgtgagtagacgtcgtgatattcgaagtatatgatgttgttgaagttttttttgtatttttttatggtgttggttagtgaggttttttttagagtttgtgttcggaagaagtttcgtggttggtagattatgacgggtttatggtgttttcgtagttgttgggggtttaggtaatgttttacggttaggagttttggtagcgtggtggttatgacgtttttaatggtgttgtatatcgagtttagtagtaggtagtatttgatttttttcgtttttaggtcgcggatttggattttaatgttttggtcgtggttgattagtagtattagtagttcggttttacggttggttagtttgtagttatttatttataggcggatgttcgcgtcgttttttgtgttttgttggtggatttatcggtataggtttatttggattttgtgaaagatgttatatgggaagggggtgaggtgttttacgggtacgatgcgtacgttattatatattattatttcgttttttttattagtttaggagcggtgtaggttgtttgttttgattagggttgggacgtttattatggtttcgttgtttaggtttcgggcgtagatgtttatggtatcgaggatttgtagtagtttttttacgtcgttgtcgggtattaggcgttggatgttttttacggtgtagcggtttcggtagtggtgtagcgttcgtggggtttttacggatagtaatttttttaggacgtttgtgtagagttagcgggggtttaggagtagtacgttttgaattgttttattttgtatgatgttgatttgcggggggataatagaaagttacgtttagggatagagttttggttaggtgtattagttatttagagtattaaagggtttgatgtcggtaatagaggttgagtagatgttttaaggagtgatttaaggttattttacgtggatgcgttttaaaaattaaatatcgagtggagaaaagtagtttgaaaatgttagaatagagattttgaaaaataatttttttgaagtttttaaaaaggttagcgaaatgaaagaagaaaaaaaaatgggagatggtaattaaatgtaatgagtgattttagattggattttgaattttaaaataagtatataaataaaaatagttttaaaagaaattattgggattagtggtaaatttttgtatgaggatgatatatttaattatagtattatattaatgttatgtttttggaattattaattatattgggttatgtgggaaaatatttttttttttaggagatataggttaaattatttagggaagaaatgttattatgtttgtaaaataaataagtaaataaatagaaaggaaaggaatcgagtaaatgtagtaaaatgttaataattgattagtttaaatgtagtaggttgggtatcgtgatttatgtttgtaattttagtattttgggaggtcgaggcgggtggattatttgaggttaggagtttgagattagtttggttaatatggtaaaattttgttttttttaaaaatataaaatttagttgggtgtgatggtttgtgtttgtaggttgaggtagaattatttgaatttaggaggcggaggttgtagtgagtcgagattgtgttattgtattttagttttggtaatagagtgagattttattttaaaaaaaaaaaaaaaaaaattaattaattaattaaaaaaataaataaatgtagtttatatgagagtttatggtattatttttgtaatttttttaaaggtttgagaatatttttaaaaaagagttagaatattttattattatattattatgtgaatgtttaatatatatatatagaaaaggtttgaaaggatatgttgttatgataatagttggttttcgagaaggggagagaggagtgagattagagatgatggtttaaggggattttagttttttggttgtgtttattttttaaaaaaataaaaagaaaggaaaaaaaagtgataaaaaatagaaggaattttttttttatggaagagttttgtttttttttttggagagtggttatcgttttggatttttttatttggaggttttgattttatcgggattatatagtaattttttgttatagtttggtttaaatttaaaagatgttttttgtttaagagtttatttagaattgaatttaggttgaaaattttggagggtagagttaatattgatttagtttttgatatagtatttgttggaatattatttgtagtttggttttaaatattgtttatcgttttaggtttaggaaagacgaaattgttttatagtggaggagaatagggagttaagatagttagttaaacgtagtgtgggattttgggttagaaaatagagttagaagggttattggggagttttgaagatttgtaaattagatacggaaggtaggtttggaggaggttcggggttaattaaagtcgggttatataatgtagtttttgttgtttaattattttttttttttatatttttatttatttattaaatttttaagggtaagtagggatgtaatgataaataaaggagattatatgatatgatttagaaagttgttggtttattattagaaagtaagggatttttgtgttaaaggagtttagaattagaattgatatattttttatatttagtagtattttgttatttaagatgtggttttttatttgtgtttttttttggatttaattattttaaagtatttttggatgagttggtagattttttggttatttaattgggagtttaaaggttgatgaaattattgttcggcgattttagtttttaaggttattggtttgtggatttaggtttagttttaagaaatttgtatgatttatataaattggttatagggttagatttggtatttgagattggggaggtaagtatttggtttttaataattttagagttgtttttagttgtaatatttagaatcgttttttttggtttatattagtttatgtaggtttttaattttatatggtggagaaatacgaaggtattgttttcgtttttgggataggtatatgatgttattagaatagggtttttaaatcgcgttttggtgtttaatgttatagaattagagtaaagttttttatttttaattatttttgttgggtattgtttgttagagttttttaatgtgtatttttaattatgattattttgtgtatttgtgtattagagttttttgtttttgtatttttagatattgtttttataaggatattttattgtttttttttaattgtttttttatttaggagatttgtgtggagttgatgattttacgttgatataaagaagttattttgaaggttgttaggagtagtagattaagtttttggtgtttagggggagtgaagagagatttagttatttagggtagtgggtattgtatttttaaattaatagattttggaaataaaagtaaaatacgataagataaaatgatagtttttaaggtgagtcgagaattgtagtttagagcgttatttgaggttgtgtttgttatacgtgtggaaatgttgtaggttagttggattatttttatattgtttttttaggtttatattatttttaagagttggaatttgggataggttgagtttttggtattttttacggttttttgtttgggtttttaggggtttatttcgtttgtgttgtggagttgttgagtaatgcgtttgaggtttttttcgttggttagggggtttagttggttttgtacgtcgtatataaattgttgtagcgatattagttggttgggtttattgagttttttttaggaaggtagcgtggagatgatttttttatataggtgagttatgggaggatagatttagagggggtagggttagataggttaatttatttgtagttgtgggtgttttgagtagagttatagtggaaaggatattttttatttaggcgttttgtaggtgatttgatgaacgagtgggtttttttgttgttgttgacgtttttttttttttttttagattgggtttcgttattgtttaggttggttttaaatttttgggtttaagtaatttttttgttttagttttttgagtagtttcgattataagtatatattattgtgtttggttagtttgtgttttttgggttgagtattggggtagttgttttttagattt

SEQ ID NO: 71 - DNA, 3158 bp, Artificial Sequence
  chemically treated genomic DNA (Homo sapiens)
tttcgttttcggattttacggttgtaaattgatttggcgcgcggggaggaggagagcgtaggcgagcgaattcgcgagagagggagagagcgagcgagtaatagcgagagcgagagcgagagagtcgggaggtagagggagtagtgatcgtttttcggagtcgggatttatgtttgttttcgggattagcgaaggggattttacggttgagtatgagttaggttgttaggagttaggtatttttacgtttgtagttttcgcgtcgtgttcggaatgcgagttggacgtagggtttttttaagtttttatcgagtcgaataaaaagcgttcgttcgtagtttttcgttaaagacggatattgattttaggattttatagaatggagtaagaatgagaggaaaaaggtcggtagaaaagtatgaattggaggtttgttgagtttttttattttttgtttatatggggtcgtattttagtgtagtttttttattaggaattagttgggatagattaatatgtttttaaggaatttgattggtttattttagatagggggtttttttattattttaggagttatttattttttgtggaaagatatcgttaaggatttataattagatataaaatatatagggagtttgttcgttggaaggtgaggaatatagttatcgagaggagagatttggttcgttatttagtgttttttatgtcggagttttaaaggagtattcgtttgtttggtaggagatttattatttagtagtttatcgatattattattaaaaagtacggtatttatttgtttattttagttatattgggaggggaggaggttttgattatgtatatggataaaagtcgtttcgataggaagttagggaatgttatttaaagtgttgaagttttgtattagttcgtattattttattttgttgatcgtgatggtattatgaggaggttttatgagatttagatattaattggagtaattaaggttatagagatacgtattgggtttttgggttgtaatagttatgataatttggattttgtgagtttcgtttttttgtaaagtacggagagtaaattgtatttttaaggtttttagataatttttttttagtatttgtaagagaagtttgtttagtcggttttgagttatattatgtgtaatggggagggggagtatttgtgttagaatagttagtgtcgttgttaatgtgtcgaggagttttcgtagtgtaattgttttattacggatatttagattatggagtatacgttggttaatatggttaagttttgggtcgaagtttataaggatttggagaatttagatgagtttaaattatttatgaagcgtttttttagtaattattttttgattatcggaagtatttattagtattggggtaatgattgggatttgtagaatcgttataagtttttgtagagtgttacggaggtatagagataaaagatttaacgtattgttcgtaagtttttcggttttagtgtacgttgtcgttataattttaattattagttgtttagagagaggataatttagtagtggtttgtaagggtttagttatttttttattgtaatgagaatgggttttggggaatttttttggagagttagcggagttgcgtgtgttacggtagtattacgttgtgttagcgttttattttttgcgtgataggcgggaataatagttgtattatgtgtagtttggttaatatttttttttgtggtttttgtaataagggttataagttgtatcgaggtcgttgtgaattatagaacgtggattcggagcggagcgagtagtttattagttttgagattgatttggatttttaggatttggagttgaagtatttgttgtagaagatggatttacgtttttacgtttatattatttttattagtaacgagattcgtttcgatattttttttgattttcggtggcgtaagcgtatgttttttatttttaagagtaataagaatcgtatggattttatttatatggtgatcggtatgtttatgcgtatttgttagatgcgtaatagtagtttggattttatgttttttgtttatgttaatttttttagcgggagttattcggagggttggaatatgtttttcggggaatttggttatttacgttgggagaagattcgtttttaaaatagttagtgttataattggatttttttgttgggtaatcggtggaaaatatttttcgagacggtttatatttatttacgtagtcggattcggttatttattttattgcgaaatgagattggttagggtttcgtggatttgtcggatttttttaagaggtagttttatattaagattttagacgtgtaggtgtttgggtatagtttgaggtttaacgtcgattttttgcgtagtgtagtgtagtaggttaattagttttatatatagggcggttagttttattttttttcgttagtgatgttttttttgttggatattcgggatcgaattaatcgtttggttttttttgtggtttcggggaaattttagttggatttgtttttttgtatgttgaaatatcgtttgaaattgattaatagcgagattattagggtgaattacgttttggatttgtataatacggagatttttaaatagtcggattagatgatagttaaattttgttaattcgggattttttgttatggattttttttgttgttgtatatatataatagaataaaatgaagtaaaataaaataaaaaaatttataaaaatttgtaaaatgtaattaatatttaaagaaaaggaggaaaatttttatttgttggaaatgaaaacgttttagtaattgtataaaagcgttgggtatgtttgttatttttatatttattttgttatgaagaagggttttagttttttgtggagtattgagggagttgttttttaggttttaggtgttgtattgggggagaagggagaaagtatatgtaatgaattgtaaagatttttgttgtgtaggtgttaagattaaatattaaaaagaaagagagatatatgtaatgtataattgatattgttattttttttttttggaggaaatggatatagataaagaagatattttttcggttaagattt

SEQ ID NO: 72 - DNA, 3158 bp, Artificial Sequence
  chemically treated genomic DNA (Homo sapiens)
aaattttaatcgaagaaatattttttttatttatgtttattttttttaaaaaggaaaaatggtagtgttagttgtatattatatatatttttttttttttttagtgtttaattttagtatttgtatagtagagatttttataatttattgtatatgttttttttttttttttttaatatagtatttgaggtttaagaagtaatttttttaatgttttataaaaggttgagatttttttttatgatagagtgagtatagaaataataaatatgtttaacgtttttatatagttgttagaacgtttttatttttaataaatgaagatttttttttttttttttgaatattaattatattttataaatttttgtgggtttttttgttttgttttgttttattttgttttgttgtgtgtgtataataataggaaaagtttatggtaaggagtttcgggttagtagagtttggttgttatttggttcgattgtttgaggattttcgtgttgtataggtttaaggcgtggtttattttgatgatttcgttgttggttagttttaggcggtgttttagtatataggagaataagtttagttggggttttttcggggttataggaggggttaggcgattaattcggtttcgaatatttaataagaggagtattattgacgaagaggaatagaattggtcgttttgtgtgtaggattggttgatttgttgtattgtattgcgtaggaggtcggcgttgaattttaggttatatttaaatatttgtacgtttgagattttgatgtagaattgttttttggagggattcgataggtttacggggttttggttagttttatttcgtagtagggtaggtagtcgagttcgattacgtaggtagatgtggatcgtttcgaaaaatgttttttatcgattgtttagtaaaagagtttagttgtagtattggttgttttggagacggatttttttttagcgtgggtagttaaatttttcgaagggtatgttttagtttttcgaatggttttcgttaaaggggttgatatagataaagaatatggggtttaggttgttgttgcgtatttggtagatgcgtatggatatgtcgattattatgtggatgaagtttatgcggtttttgttgtttttgagagtgagggatatgcgtttgcgttatcgagggttaaagaaggtgtcgaggcggatttcgttgttgatgaaggtggtgtggacgtagaggcgtgagtttattttttgtagtaggtattttagttttaggttttggaagtttaggttagttttaaagttgatgaattgttcgtttcgtttcgagtttacgttttgtggtttatagcggtttcgatatagtttgtagtttttgttgtaggagttatagagggagatgttggttaggttgtatatggtgtagttgttgttttcgtttattacgtaggggatggggcgttggtatagcgtggtgttgtcgtggtatacgtagtttcgttggttttttaggaaggttttttaaaatttatttttattatagtagaggagtgattggatttttgtaagttattgttgaattgttttttttttaggtagttggtggttgggattgtggcgatagcgtatattgaggtcgaaaagtttgcgggtagtgcgttggattttttgtttttgtgttttcgtggtattttgtaggagtttgtagcggttttgtaggttttagttattgttttagtgttgatggatgttttcgatggttaggaagtggttgttggggaggcgttttataaatgatttaaatttatttgaattttttaggtttttataagtttcggtttaagatttggttatgttggttagcgtgtattttatgatttggatgttcgtgatggggtagttgtattgcggaaatttttcggtatattggtagcgatattggttgttttggtataggtattttttttttttattgtatatgatatagtttaaggtcgattggataaattttttttgtagatattgaggaaagattatttgaagattttgaaggtgtagtttgtttttcgtgttttgtagaaggacggaatttatagagtttagattgttataattgttatagtttagaggtttagtgcgtgtttttgtgattttgattgttttagttgatatttggattttatgaagtttttttatggtattattacggttaataaagtaggatgatgcgagttggtgtagagttttaatattttgagtggtattttttgattttttgtcgaggcgatttttgtttatatatatggttaaagttttttttttttttaatgtggttgagatgagtaggtgggtgtcgtattttttgatgatggtatcgatgaattgttgagtggtaggttttttgttaagtaggcggatgtttttttgaaatttcggtatgaggggtattggatggcggattagattttttttttcgatggttgtgttttttattttttaacgggtaaattttttgtatattttatatttggttgtaaatttttgacggtgtttttttataaaggataggtagtttttggagtggtggaaaggttttttgtttgaaatgagttaattaaattttttggagatatgttggtttgttttagttggtttttggtgggagggttgtattgagatacggttttatataaataggaagtagaggagtttaataaatttttagtttatgtttttttgtcggtttttttttttttatttttgttttattttgtggagttttggagttaatgttcgtttttggcggagagttgcgggcggacgttttttattcggttcggtgggaatttgggagagttttgcgtttagttcgtatttcgggtacggcgcggggattgtaggcgtgggggtatttggtttttagtagtttggtttatatttagtcgtaaagtttttttcgttggtttcgaggataggtatgaatttcggtttcggaaggcggttattattttttttgtttttcggttttttcgttttcgttttcgttgttgttcgttcgttttttttttttttcgcgggttcgttcgtttgcgtttttttttttttcgcgcgttagattagtttgtagtcgtggggttcgggagcgagg

SEQ ID NO: 73 - DNA, 3720 bp, Artificial Sequence
  chemically treated genomic DNA (Homo sapiens)
tgtagttgtttattaaaattttatatatattttggtatataattatattcgttggaatttattttatagatatatttatatttatatagttaaggatgttgattttaataatattggtataagtaaaaagttggaaattgtttatatgtttatggataggggataaatcgattaatttaaggtttttttttataatggagtattatatagttttgaaaaagaatgataagatttttatgttaggatatggtataatttttaagttattttaagtgaaaaaataataataataataatattgtagaataatgtgtatggttggatatatataaatttttttgaaagaatatttaagaaatttaaatgtggttattttaggagttaggaatgaggtaggtggagaggagggatttttattttttaatttagaatatattttgttgtgttagttgattttttttttattgttaataagtattatagttttttttaatttaaattattttttttagtataaatttaaaaaaaaaaaatttaaaatggaaaaatatataggcgtgagtaaaagaaatgaatggtaataatttttgtggtttattgagtgcgtttggatatttatgtgtttttagtttttttttataggaaatgtataggtgagaaattgacgttaagggggattgagtgttaagttagttagtggtagagggtagatttaaatttaatacggtttttttttgttgtttttcggtttttgtttttaggtgggaagcgtatttatcggacggtcggttcggtgaggcgtagcgttttagattggcgtattcgcggttttagcgttttacgtttggggagcgcgcgcgtacgtagcggcgcgagtttggcggcggcggcgataataataacgttatagttcgagttttttttttcggagttttcggtatatattttgtgtttatgtttgggtatttacgttacggcggtagggtcggggttttttaaaatggtagtggttcggggagtcggaagttcggagttagcgtcgtcgtagttatataagtgggggggttgtgggttgggggagttcggtagcgttttggagaggcgaggagtcgtcgttcgaggtcggtgcgggcgagcgagggcgtcgcggtttttcgattttttttttagaggtgagtgttcgaagttaggagttcggcgtttataggtttgtgcgttgcggggaatttttatcgttagttttttcgttattcgcgcgtttttaagtttagcgggcgaggtttcgggcgttttatagtcggcgtcgcgttatgttttattttagcgagtttttcgaattcgacgcgtttttcgttaagtttattgaaggttgttgcgtcgaatttagcgttgaattgtttcggttgtttgttagggacgttttcgcggttatcggttattttggaggtaaggagggcgagtaggggtgtttagacgacgacggcgtagcgcgggggcgtattatatttgagaattaggagggattgggatattggagttatgagaataggggcgatgggaagtttaggagttttggggtgcgtatttttatttttatttatattgggtcgttagcgttttcgtaggaatttgtgcggttatcggagcgtttttttgtttgtgtacgtgtgttttgcgtgtgtatgtttttatgtgttttttgggacgtatgcgggtttttgttgaattagaatgtgtaaaaggtattttgtgtatattcgtgggtattaagagttttgtaggtaggggttgtggatttaggtgtattttttgatgtgtttagagttgatttttgttttttttttagtaggcgattttttgagttgggttttgaatagttgcggcgtaagtggggatttagtcgatttttgttttttggaggggtttgcgtttatattttttttcggttttagttatagcggtagtttttttatttaggtagtgttcgaatattcgtacgattcggaggtattttttaattttatgtcgggcgttttaggtttggtattttttttcggtttagaggtagtagcgtttagattttcgttggatgtttttttttttgcggggttcgatgttttgttgtcgggttcgtcggatttttatttttcggatttgggcgttgttttttttttagaggcgttttgggaggtttcgttttgcgcgggtgttttttcgtagtgtttgtatgagttttagtttttttcgttcgacgttaagttcggttttcggcggtttttcgtttcgttagcgttggacgttgtttttgtttttaagggtttttacgcgttttgggagttgttttttgtgggggttttagggaattgtgggttatagggagattattaggtcgtttcggaggttcgttttttcgtaatagggattaagattgaggatttgttgtttattagttgttttgcggaattgtcggtcgttttagttaatagattttattttagcggggtttatgacgttttttcgttggtttcgggtgatttaggggagggggttgagggtttttttgggtttttgattttttttagtggggagggagggagtagcggcgacggcggagagtttttggttagtacgtagttttagtttttttcgttgggttttcgtagcgtcgtcgcggcggatttttttaaatttttggtggcggatatttttggaagtagtggcgtggttgtattattcgtgtcgtcgtcgtcgtttattttttttttttaggttaaggcgcgacgtaaggggcgtcgcggcggtaaatgtagtacgcgttgtttttgttcgcggtcgtacgttaaggttttcgtttgttcggtggagagttgtgtgcggagttttgcgcgtttcgacgagtttaatcgttatttgcgtatttatacgggttataaatttttttagtgtcgtatttgttttcgtaattttagtcgtagcgattattttattagttacgtgcgtatttatatcggcgagaagttttttgtttgcgacgtgtgcggtcgtcgtttcgcgcgtagcgatgagaagaaacggtatagtaaggtgtattttaagtagaaggcgcgcgtcgaggagcggtttaagggtttcggtttttattcgttgggtttttttttcgtttttttttgagtaagagatgggtttatgggttggggcgtcgtcgttcggcgcgtacgagtttcgggtcgttttttttttcgttttttttttaattttttttcgtacgttcgagggtcggttttcgtttcgtttttagtttttttgaagcgttcgtcgtatacgttttatttagtattagttcgtcggatagttttcgcggtttaggcgttgttatttttgttagtcgcgttttgggggaagttttttgagattatttagtgaataggtattattttgggatttaagatagttttttgtaattgtatacgttttacgtttttttttataatttttagagataggttggggtaggttaaggcggtttcgcgcgggattttgtatagtagtgttttatttagtagtcgattggatgtaacgttttgttttgggttttttttttttttgttgttgttaatttttgtaaagtagacgttatttttaagtagttgataaaattgtttatttttgtaattaaaattattgtgttaaaagtttattgaatttgttatgtaagttttt

SEQ ID NO: 74 - DNA, 3720 bp, Artificial Sequence
  chemically treated genomic DNA (Homo sapiens)
aggagtttatatggtagatttagtaagtttttagtataataattttaattgtaaaaataaatagttttgttaattgtttgagagtagcgtttgttttataaaaattaataataataaaaggaaaaaaaatttaaagtaaaacgttatatttaatcggttgttggataagatattgttgtataaagtttcgcgcgagatcgttttggtttgttttagtttgtttttgggggttatagaggaaggcgtggggcgtgtgtagttataaaagattgttttgaattttagggtagtgtttatttattgggtggttttagaagattttttttaaagcgcggttgataagggtgatagcgtttggatcgcgggaattgttcggcgagttggtgttgaatagggcgtgtgcggcgggcgttttaaggaaattggaagcgggacggaggtcggttttcgggcgtgcgaggaggagttggaagaagagcggggaggggaacggttcggaattcgtgcgcgtcgaacggcggcgttttaatttataaatttattttttgtttagagagaagcgaaggagaggtttagcgagtaaaagtcgaggtttttgagtcgtttttcggcgcgcgttttttgtttgaggtgtattttgttgtgtcgtttttttttatcgttgcgcgcgaagcggcggtcgtatacgtcgtaagtaaaaggtttttcgtcggtgtgggtgcgtacgtggttggtgaggtggtcgttgcggttgaagttgcggaggtagatgcggtattggaagggtttgtggttcgtgtggatgcgtaggtggcgattgagttcgtcggagcgcgtaaagtttcgtatataattttttatcgggtaagcgaaggttttggcgtgcggtcgcgggtagaagtagcgcgtgttgtatttgtcgtcgcggcgttttttgcgtcgcgttttggtttgggggaaaggggtgggcggcggcggcggtacgggtggtgtagttacgttattgtttttagggatgttcgttattagaggtttagggaagttcgtcgcggcggcgttgcgaaggtttagcggggaaagttgaggttgcgtattggttagaaatttttcgtcgtcgtcgttattttttttttttttattaggaggggttaggagtttagggaggtttttagtttttttttttaagttattcggggttagcgggaaagcgttataggtttcgttgggatagagtttgttggttgggacggtcggtagtttcgtagggtagttgatggatagtaagtttttaattttggtttttattacgggaaaacgagttttcggggcggtttggtagtttttttgtgatttatagttttttggggtttttatagaaagtagtttttagggcgcgtagggatttttgaaggtagagatagcgtttagcgttggcgaggcgggaggtcgtcggaggtcgggtttgacgtcgggcggggagagttgaggtttatataggtattgcgagggggtattcgcgtaaggcgaggttttttagaacgtttttgggaaaggggtagcgtttagattcggggagtaaaggttcggcggattcggtagtaaggtatcggatttcgtaggaaaaggggtatttagcggggatttggacgttgttgtttttggatcggggaagggtgttaggtttaagacgttcgatatgaggttgaagagtgttttcgggtcgtgcgggtgttcgggtattgtttgaatgaagaagttatcgttgtagttgaggtcgggagggggtgtgggcgtaggtttttttaggaagtaggagtcggttaagtttttatttgcgtcgtagttgtttaaagtttagtttaagaagtcgtttgttgaggagggagtaggaattagttttgggtatattaaagggtgtatttgagtttatagtttttatttataaaatttttggtgtttacggatatatataaagtgttttttgtatattttgatttagtaggggttcgtatacgttttaaggagtatatagaaatatgtatacgtaaaatatacgtgtataggtaaaagggcgtttcgataatcgtataggtttttgcggaggcgttggcggtttagtgtgggtgggaatgggggtgcgtattttaggatttttaagttttttatcgtttttatttttatagttttaatgttttagttttttttggtttttaggtatggtgcgttttcgcgttgcgtcgtcgtcgtttgagtatttttgttcgttttttttatttttagggtagtcggtggtcgcgggagcgtttttggtaggtagtcggggtaatttagcgttgggttcggcgtaatagtttttagtggatttgacgaggagcgcgtcgggttcggaaaattcgttaaggtggagtatggcgcggcgtcggttgtggggcgttcggggtttcgttcgttgggtttgggggcgcgcgggtggcggggaggttggcggtaggggtttttcgtagcgtatagatttatgggcgtcgggtttttggtttcgggtatttatttttgggaaaggagtcggggagtcgcggcgttttcgttcgttcgtatcggtttcgggcggcggtttttcgtttttttaaagcgttgtcgggtttttttagtttatagtttttttatttatatagttgcggcggcgttggtttcgggttttcgatttttcgggttattgttattttgggaggtttcggttttgtcgtcgtgacgtaaatgtttaaatatggatataggatgtgtgtcggggatttcgaaaaggaaagttcgagttgtgacgttgttgttgtcgtcgtcgtcgttaggttcgcgtcgttgcgtgcgcgcgcgttttttaggcgtggagcgttggggtcgcggatgcgttagtttggggcgttgcgttttatcgggtcgatcgttcggtagatgcgttttttatttggaggtagaggtcgaggggtagtaggggaggatcgtgttgggtttgaatttgttttttgttattaattagtttgatatttagttttttttaacgttagttttttatttgtgtattttttgtggagagaaattgagagtatataaatgtttaggcgtatttagtaaattatagagattattgttatttattttttttgtttacgtttgtgtgtttttttattttaagttttttttttttaaatttgtgttaggaaaaataatttaaattaaaaaggattgtaatatttgttaatagtaggaggaaagttaattagtataatagggtatattttaaattgaaaagtaaaagttttttttttttatttattttatttttagtttttgaggtagttatatttaagttttttgggtatttttttagaagaatttatgtatatttaattatatatattgttttgtaatattattattattattatttttttatttgaaataatttagagattgtgttatgttttgatataaagattttgttatttttttttaaggttgtatagtattttattgtaagggaggattttgagttagtcgatttattttttatttatgagtatgtaggtagtttttaattttttatttatattaatgttgttggagttaatatttttgattatataaatgtgaatgtgtttgtgagataaattttaacgagtgtaattgtgtgttaaagtatatgtaaaattttgatagataattgta

SEQ ID NO: 75 - DNA, 4001 bp, Artificial Sequence
  chemically treated genomic DNA (Homo sapiens)
ggtttattgtaatttttgtttttcgggtttaagtaatttttttgttttagtttttttagtagttgggattacgggtgtttgatattatatttggttaatttttgtatttttagttgaggcgggttttattatgttggttaggttggttttgaattgttgattttgtgattcgttcgtttcggttttttaaagtgttgggattataggtgtgagttacggtatttggttttcgttgattttttggggggtaggttttaattttatttaggagtgtttttgtttttaggattttgttttttaggaattttaatttttaattttttagagtaaagatagtatgaggtaggattagttatagggagcgttagataagtgtttgttgagtgaatgaatgaatgagtggatgaatgaagtttagttacgagttttcgaataaaagggattagttgaggttatggaatttatttttttgtttagagttggttatagttttttatgtttttttggattttggtggttaggatttgattttagttttgaggttttttttaggtgggtttttttttttttattagtttgtagttttagttgttttttttgtttatagtagaaaagttaatattttttttggtttttatgaatattatagtaaaatgatttgtgtttttaaagtttagtttttttagatttataatgttatagtttatttaagtgatattgggatttttcgattataaatatttggtgtattaggtttgatattagattagggtttgggtttagggtttttagttgagaattttagtttagttgtttattgagtgattttgagtaagtttttagatttttagggtagaagttaaatcggatttatttttatgttttgtagtatttgtaatttggtgaatatttattgatttaaatttggttgtaatagtttttatttttttagaggaggtatatgagagttaaatgaggtaatgaattgcgtagttatttgtaaatatgacgaggttttgtaaatagaattgggataatataaatattcgttagaataatttttttattttttgaaagagtatatattttttattttatttcggttttttttttagggggaggatgggtggttaaatataagatggagatgttattttagaggggttttttataggtggagggtagggaaggaatttttttttagattattttattatttaaggataggtataattattttgggttttattttagtttttttagtcgtagttttatattggttttttacgttgatattttagttgttttttttatttatagttttgtgtgttaacgtggtttttgtttttttttgttcgtagttttttgttatgttggtagggtttaaaaggaagataggtattggttggataggaagggagaggattttgaagttaagagggaattttagggtttttagtttagttttattttttatagtttagagaagtggatggaaaggttattcgtttgaataagaggagcgtttttttttttatttggttatttgtttgtttttaaggttttgtttaatttattattgttggttggaataagattttaattattttttaatgttttttttttagagtttaaaaattttttggatattattgggtagttgggagttttggataagttgttttatttttttgaatttttatttttttatttgtgtatttattttataggattgttatagagattaaatgaaagtatggataaaaatttagtatataggaagtatatcgtatattttttaaaagttaagataagataggtttatatagtaggaatatgggtaattttaaattacgagaaaattaaatatgttttgtgtttgattttggaatgttacgtattttttttttttatatttgatttttatttttttaattgttttttttttgataaataaaatgagtattttttttaagtatagtaaagagaggaggttgttggaagaattatattggaattaaaatatgaaggagttttgtaagattaaaaggatgtatttgttgtaatttgtaaaatttatatttttaagaaaggattttagaaaaattttgatttttttggggttttttttaggttttttttttttttatatttttgttttagattttattttttgggtaaaatttgggtgttggaggtagttgggtggtatattttttttttgaaacggagttttatattgttatttaggttggagagtatttgtaattatagtttattgtaagttttaattttttgggtttaggtgatttttttgttttagttttcggagtagttgggattataggtacgtgtaattatatttaattaatttttgtattttttgtatagagttttgttttgttgtttaggttgtgtaatgattttttaattaatttttgtataatataattaatagtgtaggttgaggggtgaggatatgaggaggttttatttagagaatttagtttttaaatttagttttgtagtaattgttattttttgattaatttttagtttaaggtgaggaagggtagtagtttagtttgatagtttagtatggttttattttttttattagaagatgagaggtgaagatgtttgtttgggaaatagggagggtaaggatgtattttttggaagagaggaatttttttttttagtaagaaggcgtggttatagaaggttatttttttttgtttatggtagatttggtttagtattttaagggagtttttgtagaggatagagtttagtttgtgtttttaagttagtagagagattgttgtttggtaatataaagtttagatatataaatataaagattatataattgaggaatattttggcgtagatttgtagagataatacggttatgtatttatttatagagggtttttcgggtaatatatagttacgatgatatttattttttttttagattttttgatttatggagattatttacgatttttagaatatttttattttgttttttttgtagtttagtgatttagggagtagtgttttttattgttttaggtgtatttatttatatagcgatttcgaatgtatggttgggggtcgtattgtttggggttttattttgattttattatttattagttgttatttaatttttggattgttatttagtttagaatgttggtagaatttttattataggggtgttttaggattaaaggagaatgtatgtaaaatattataaatagtttttggtagagtatatttggtttaggttatatgttagtttttatgattaatgtatataggtggatagatgggttaggatatatattgtttttatttatttttttttacgtatagtattaaggaaaaggtagtagaataacgtagttttttttaggtttttatttggttttattttttagtttttttttttgggaatttttttattttatattttaagaaatttatttttatttttttatggtttacgcgttttaaaagttatagagtatagtttttaagttggttttaagaatttgtttaaagtaaacgtttttttcgtttttaatttagattttagtaagaggttatttttcgggttattttttttttttcggttttggttgggataggttgttatgttattttttattttattatatatatatatattcgatttcgttagaagtaggagtaattaaattaaaatcgtttgaaggggagcggggaggggttggaggaggggtagggtagaggatttttttaaggaatttagtttaggttagttcggaggcggaggttgttaattggaaaggttttgagaaagtttgagggggtttaagaaggggggaaacgcgcgcgcgcgttttacgtaatatattttttgcgggaaaattttttgaataattttagagaatttttttgataagttttcggagtttttcggagtttggaaagcgttagttttttgg

SEQ ID NO: 76 - DNA, 4001 bp, Artificial Sequence
  chemically treated genomic DNA (Homo sapiens)
ttaagagattggcgttttttaggtttcgaggggtttcgggaatttgttaaagaagttttttgaaattgtttagaaagttttttcgtaaagggtgtattgcgtagagcgcgcgcgcgcgttttttttttttttgagtttttttaagtttttttaaagtttttttagttggtagttttcgttttcggattggtttgggttggattttttgggggggttttttgttttgttttttttttagttttttttcgtttttttttagacgattttggtttggttgtttttgtttttggcggggtcgggtgtgtgtgtgtgtggtggagtggagggtggtatagtaatttgttttaattagagtcggggaggaaagggtggttcggagggtggttttttgttggggtttgggttgggggcgggggagacgtttgttttgaatagatttttggggttagtttagggattgtgttttgtgatttttggagcgcgtggattatggaggggtgggggtgggttttttggggtgtaaagtgggagagtttttagagaaggaagttaagaaataaggttagatgggagtttagggagggttgcgttgttttgttgttttttttttggtgttgtgcgtggggaagggtgagtgggggtagtgtgtattttgatttatttgtttatttgtgtgtattaattataaaagttaatatatagtttgggttaggtatattttgttaggaattgtttgtggtgttttgtatgtatttttttttaattttaaaatatttttatagtggaagttttgttagtattttggattgagtagtagtttagaggttgagtagtagttagtaagtggtggggttaagatgggattttaggtagtgcgatttttaattatgtattcgaaatcgttatatggatgagtgtatttggagtaatgagggatattgttttttgagttattgggttgtaggggagataaaatgaaagtgttttgggagtcgtgggtggtttttataggttagagggtttggggagggagtgggtgttatcgtggttgtgtgttgttcgaggggttttttgtgagtgagtgtatggtcgtgttatttttgtaggtttacgttagggtgttttttagttgtgtggtttttgtatttgtgtgtttgggttttgtgttgttaaatagtagtttttttgttgatttggggatataggttgaattttgttttttgtaggaatttttttaaggtgttgggttagatttgttataaatagagggaggtagttttttatggttacgtttttttgttgaggaagaaggttttttttttttagggagtatatttttgttttttttgttttttagataagtatttttattttttattttttgatgagaagggtgaggttatattgagttgttaggttgagttgttgtttttttttattttgggttgggagttgattagggaatggtagttgttgtagagttggatttgagggttgggttttttggatggggtttttttatgtttttattttttaatttgtattattgattgtgttgtgtaggagttagttaaaaagttattgtatagtttgggtaataaggtaaaattttgtataaaaaatataaaaattagttggatgtgattatacgtgtttgtagttttagttatttcggaggttgaggtaggaggattatttgagtttaggaagttgaggtttgtagtgagttgtgattgtaaatgttttttagtttgggtgatagtgtgagatttcgttttagaaaaaaagtatattatttagttgtttttagtatttagattttatttaaggggtgaggtttggggtaggaatgtgggggaaggggaggtttagggggagttttagaggggttaggatttttttgaaatttttttttagaggtatgggttttataaattgtagtaaatatatttttttaattttgtagaatttttttatattttaattttagtatgatttttttaatagttttttttttttattatatttggggaaagtatttattttatttgttaagaaaaaaataattgaaaagatagggattaaatgtaaaaagaaaaaatacgtggtattttaaagttaaatataaagtatgtttaattttttcgtggtttgggattatttatatttttgttgtatgaatttgttttgttttaatttttaagaaatgtacggtgtattttttatatgttaggtttttatttatgtttttatttaatttttgtgatagttttgtgaagtaggtgtatagatgagaaaatggaagtttagagaaatgaagtaatttatttaaggtttttagttatttagtaatgtttagggaatttttggattttgaagaggaggtattaagaggtggttagagttttattttagttaataataatgggttgaataaagttttaggggtaggtaggtggttagatgggaggagaagcgttttttttgtttaggcgaatgatttttttatttatttttttaggttgtagaaagtggagttgagttgggggttttgaggtttttttttgattttagagttttttttttttttgtttagttaatgtttgttttttttttgggttttattagtatgatagggggttgcgggtaggaggggatagaggttacgttgatatatagggttgtgggtgagagagatagttgaagtgttagcgtgaggggttagtgtggggttgcggttgggagggttggggtggggtttagggtagttgtgtttgtttttgggtgatggaatgatttggaaagagattttttttttgttttttatttgtgagaagtttttttagagtgatatttttattttatgtttggttatttattttttttttgggaagagagtcgaggtggggtaagggatgtgtatttttttaaggagtgggagaattattttagcgaatgtttgtgttgttttagttttgtttataaagtttcgttatgtttatagatggttgcgtaatttattattttatttaatttttatgtattttttttgagggagtaagagttgttatagttaagtttaggttagtaaatatttattaagttgtaggtattgtagggtatagagatgaattcgatttagtttttgttttggaggtttgggaatttgtttaagattatttagtgagtagttgagttagggtttttaattaaagattttgggtttaggttttggtttgatgttaggtttgatatattaggtgtttgtggtcggggaattttagtgttatttgaatgggttgtgatattatgggtttgggagagttgagttttggggatataggttattttattgtagtatttatggaaattaagggaagtattggtttttttgttgtgagtaagaggagtagttggggttgtaagttggtggggaggagagaatttatttgagagaaattttaggattggggttaagttttgattattagagtttagagagatatgaaggattgtgattagttttgagtagagagatggattttatgattttaattggttttttttgttcggagattcgtgattggattttatttatttatttatttatttatttatttagtagatatttatttagcgttttttgtggttggttttgttttatattgtttttgttttggagaattggaggttggggtttttgaggggtagggttttggagataaggatatttttgggtagaattaggatttattttttaggaaattaacggggattaggtgtcgtggtttatatttgtaattttagtattttgggaggtcgagacgggcggattataaggttagtagtttaggattagtttggttaatatggtgaaattcgttttaattaaaaatataaaaattagttaggtgtggtgttaggtattcgtaattttagttattgaggaggttgaggtaggagaattgtttgaattcgggaggtagaggttgtagtgagtt

SEQ ID NO: 77 - DNA, 4858 bp, Artificial Sequence
  chemically treated genomic DNA (Homo sapiens)
ggaatttttttttttttttttttttttgaaatagggtttcgttttgttatttaggttaaagtgtagtgtcgcgattttagtttattataatttttgttttttaggtttaagggatttttttattttagttttttaagtagttgggattataggtatgtgttattatattcggttaatttttgttttttttatagagatagggttttattatgttgtataagtcggttttgaatttttgagtttaagtgagttatttgttttggttttttaaagtgttgggattatatatgtgaattatcgtattcggttttaaaaatgtttttttaagcgtaattacgtaatgttagttgtagtttagatttttggatgttaatttaaaatagttttataggaatttagtgtggtggtttacgtttgtaattttagtttgaggtaggtggattatttgaggttaggagttcgagattagttgggttaatatggtgaaattttgtttttattaaaaatataaaaaaattagttgggtatagtggtaggtattcgtaattttagtttttcgggacgttgaggtagaagaattgtttgaatttaggaggtagtggttgtagtgagtttagatcgtgttattgtattttagtttgggtaataagagtaaaattttgttttaaaaaaattaattaatttaggttgggcgtagtggtttatgtttgtaaattttagtattttgagaggttgaagcgggtggattatgaggttaagagatcgagattattttggttaatacggtgaaattttatttttattaaaaatataaaaaaaaaattttaaaaaataaaaaaataaaaataaataaataaattaaaaaaatataataattagttaggcgtagtggtaggcgtttgtaattttagttagtcgggaggttgaggtaggaggagaatggagtgaatttaggaggtagagtttgtagtgagttgagatcgcgttatagtattttagtttgggtaatagagcgagattttattttaggaaaaaaaaaattaattaattaaaaaaatagtaagataaataatattttttttattttagtaaaaggatgaagttagttttttaatgaataaaaataagagattgttgaatgttaagttttatagatagtttagataatatagggagatattatttttatatatatatatatatatatatatatatatatatatatatatatatatatatatataaaatagttgcgtatggtggtatgggtttgtagttttagttattggggtagggttagggggtgggaggttgaggggagaggatgttttaatagggaggttgaggttgtagagagttatgattacgttattgtattttagtttgggtgatatagtaagattttgttttagaaaaaaaaaaaagaaaaaagttaagaatgtatttttgaggaattttattaataaaatgtattaaatatagttaaagagttttttgttatatgttaagtggaaagttatgaagaaagagaagaatagaagtaggaggatattggtttttattttttatttttttaagaagtaagatttattattttttaaaaagtttaaatattggtaaggtaagatataatttttatttataatattgtatttttgtttttaggtaataaattaaatgttagataaaagtataatatttattatttaatttttaggttttagtatagaatttataaatattttgttggttaaggtaaaaaggtgtattgtatttttagagagtttgtagagttttgagtattaattttataatttttatattttaatttatataaagtattattaggttaagaaatagattatatagtaggtataatatttttgggtatgtaaatatgttaaggattaaagtaagaaaagagtaattataggggttatattatatttgttaaaaagtgatttgtttaaaaattaaaaagaagtcgggtgtagtggtttatatttgtaattttagtattttgagaggttggggtgggtggattatttgaggttagtagtttaaaattagtttggttaatatagtgaaattttatttttattaaaaatataaaattaggcgtggtggtaggcgtttgtaattttagttattagggatgttgaggtaggagaatcgtttgaattcggaaggtagaggttgtagtgagttaaaatcgtattattgtattttagtttgggtaataagagtaaaattttgttttaaaaaaaaaaaaataaaaataaaaataaaaaagaaatttagtttatttttttgtgtaatttttaataaattgttgagaagtgattttatataggaattttgtataatttattttgatgcgttcgaggtggtcgttagttgatttcgcggagtttatttttttggttttttcgttttaacgtcgttcgttttttagttaggatgtttgttcgtggttcggttatcggtatcgatttgggtattatttattcgtgcgtcggggttttttaatatggtaaggtggagattatcgttaacgattagggtaatcgtattatttttagttacgtggtttttacggatatcgagcgttttatcggcgacgtcgttaagaattaggtggttatgaattttattaatattattttcgacgttaagaggttgattggacggaaattcgaggatgttatagtgtagtcggatatgaaatattggtcgtttcgggtggtgagcgagggaggtaagtttaaagtgtaagtagagtataagggggagattaagattttttttttagaggagatattttttatggtttttacgaagatgaaggagatcgcggaagtttatttggggggtaaggtgtatagcgcggttataacggtttcggtttattttaacgattcgtagcgttaggttattaaggacgtaggtattattacggggtttaatgtgttgcgtattattaacgagtttacggcggcggttatcgtttacggtttggataagaagggttgcgcgggcggcgagaagaacgtgtttatttttgatttgggcggtggtattttcgacgtgtttattttgattatcgaggatggtattttcgaggtgaagtttacggtcggcgatatttatttgggcggtgaggatttcgataatcgtatggtgagttatttggcggaggagtttaagcgtaagtataagaaggatattgggtttaataagcgcgtcgtgaggcggtcgcgtatcgtttgcgagcgcgttaagcgtattttgagttcgtttacgtaggcgagtatcgagatcgattcgttttacgagggcgtggatttttatacgtttattacgcgcgttcgtttcgaggagtttaatgtcgatttttttcgcgggattttggagtcggtggagaaggcgttgcgcgacgttaagttggataagggttagatttaggagatcgtgttggtgggcggttttattcgtatttttaagatttagaagttgttgtaggatttttttaacggtaaggagttgaataagagtattaatttcgacgaggcggtggtttatggcgtcgcggtgtaggcggttatttttatcggcgataaattagagaatgtgtaggatttgttgttattcgacgtgatttcgttgtcgttgggtatcgagatagttggcggtgttatgattttatttattaagaggaatattacgatttttattaagtagacgtagatttttattatttattcggataattagagtagcgtattggtgtaggtatacgagggcgaacgggttatgattaaggataataatttgttgggtaagttcgatttgatcgggattttttttgcgtttcgcggggttttttaaatcgaggttattttcgatattgacgttaatggtatttttaacgttatcgtcgtcgataagagtatcggtaaggaaaataaaattattattattaatgataaaggtcgtttgagtaaggacgatattgatcggatggtgtaggaggcggagcggtataaatcggaagatgaggcgaatcgcgatcgagtcgcggttaaaaacgttttggagttttatatttataatattaagtagacggtggaagacgagaaattgaggggtaagattagcgagtaggataaaaataagattttcgataagtgttaggaggtgattaattggttcgatcgaaattagatggtagagaaagatgagtatgaatataagtagaaagagttcgaaagagtttgtaattttattattagtaaattttattaaggtggttttggcggcggtagcggcggcggcggtttaggagttttcgggggatttattatcgaagaagtggattaagtttgtatttaagttagcgtaaatttttttgtttttttttttttttttttttttttgtttgtttttttgaaatgtttttgtgttaagtacgagatttattgttggaagtttttggtatatgtaaatgaaaggagaggtgtaataatttagtttaattataaaagttttaaagtttgttttttaaaaatattattcgaggtttttttttaatgtattttgcgtgtttgttgatttgagtatttttgattagttcgtgtatggagatttgtttgagatgagaaattttaagtttgtatatttgttttgtagaagtttggaaatagtaaaatatataggagtttaaattgtttatttttatgtattattttaaaattaaattgaatattgtagtaatgttaaggataggtatattttttgtaaataaatgtataaaatgtaaatgtaaagtaaagttgaaattgattttaaaaaaaaaaaa

SEQ ID NO: 78 - DNA, 4858 bp, Artificial Sequence
  chemically treated genomic DNA (Homo sapiens)
ttttttttttttgagattaattttagttttattttatatttgtattttatgtatttgtttgtaaaaagtatatttgtttttaatattattgtaatgtttagtttagttttaaagtagtatataaaaataaataatttaagtttttatatattttattgtttttaagtttttatagaataggtgtgtaaatttaaggttttttattttaaataaatttttatgtacgaattaattaaaaatgtttaagttagtaaatacgtaaaatgtattaaagagaaatttcgaataatgtttttaaaaaataaattttggaatttttataattaaattaagttgttgtatttttttttttatttgtatatattaaagatttttaataatagatttcgtatttggtataaggatattttaaagaaataaataaaaaaaaagagagagagagaaaggtaaagaggtttacgttgatttgagtgtaagtttagtttattttttcgatggtgggtttttcggaggtttttgaatcgtcgtcgtcgttgtcgtcgttaggattattttggtaaagtttgttgatgatggggttgtaaattttttcgagttttttttgtttgtgtttatatttatttttttttgttatttggtttcggtcgagttagttgattattttttgatatttgtcgaggattttgtttttgttttgttcgttaattttgttttttagtttttcgttttttatcgtttgtttgatgttgtaggtataggattttagggcgtttttggtcgcgattcggtcgcgattcgttttatttttcgatttgtatcgtttcgttttttgtattattcggttaatgtcgtttttgtttagacgatttttgttattggtgatggtgattttgttttttttatcggtgtttttgtcggcggcggtaacgttaaggatgttattggcgttaatgtcgaaggtaatttcgatttgggggatttcgcgaggcgtagggggaatttcggttaggtcgaatttgtttagtaggttattgtttttggttatggttcgttcgttttcgtatatttgtattagtacgttgttttggttgttcgagtaggtggtgaaggtttgcgtttgtttggtggggatcgtggtgttttttttgatgagtggggttatgatatcgttagttgtttcgatgtttagcgataacggggttacgtcgagtagtagtaggttttgtatattttttgatttgtcgtcgatgaggatggtcgtttgtatcgcggcgttataggttatcgtttcgtcggggttgatgtttttgtttagttttttgtcgttgaagaaattttgtagtagtttttggattttggggatacgagtggagtcgtttattagtacgattttttggatttggtttttgtttagtttggcgtcgcgtagcgttttttttatcggttttagggtttcgcgaaagaggtcggtattgagtttttcgaagcgggcgcgcgtgatggacgtatagaagtttacgttttcgtagagcgagtcgatttcgatgttcgtttgcgtggacgagtttagggtgcgtttggcgcgttcgtaagcggtgcgcgatcgttttacggcgcgtttgttgggtttaatgttttttttgtgtttgcgtttgaattttttcgttaggtggtttattatgcggttgtcgaagtttttatcgtttaggtgggtgtcgtcggtcgtggattttatttcgaagatgttattttcgatggttaggatggatacgtcgaaagtgttatcgtttaggttaaagatgagtacgtttttttcgtcgttcgcgtagttttttttgtttaggtcgtaggcgatggtcgtcgtcgtgggttcgttgatgatgcgtagtatattgagtttcgtgatggtgtttgcgtttttggtggtttggcgttgcgagtcgttgaaataggtcgggatcgttatgatcgcgttgtgtattttgttttttaggtaggttttcgcgattttttttattttcgtgaggattatggaggatattttttttgggaagaaggttttggttttttttttgtattttatttgtattttgggtttgtttttttcgtttattattcggaacggttagtgttttatattcgattgtattgtggtattttcgaattttcgtttaattagttttttggcgtcgaagatggtgttggtggggtttatggttatttggtttttggcggcgtcgtcgatgaggcgttcggtgttcgtgaaggttacgtagttgggggtggtgcgattgttttggtcgttggcgatgatttttattttgttatgttggaagatttcgacgtacgaataggtggtgtttaggtcgatgtcgatagtcgggttacgggtagatattttgattgaaaggcgagcgacgttaggacgggaaaattagggagatgaatttcgcggagttaattaacggttatttcgaacgtattagaataaattatataagatttttatgtaagattattttttagtaatttattaggaattgtataaggaggtaaattggattttttttttgtttttatttttatttttttttttttgagatagagttttgtttttgttgtttaggttggagtgtagtggtgcgattttggtttattgtaatttttgtttttcgggtttaagcgatttttttgttttagtatttttagtagttgggattataggcgtttgttattacgtttaattttgtatttttagtagagatggggttttattatgttggttaggttggttttgaattattgattttaggtgatttatttattttagttttttaaagtgttgggattataggtgtgagttattgtattcggtttttttttaatttttaaataagttattttttggtaaatatagtatggtttttatagttattttttttttattttgatttttaatatgtttgtatatttaagagtgttgtgtttgttatataatttgttttttagtttgatggtgttttgtgtagattgagatatgaggattatgggattagtgtttagaattttgtaagttttttggaaatatagtatatttttttgttttagttagtagaatgtttgtgagttttgtgttgaagtttgggggttgagtggtagatattgtgtttttatttgatatttgatttgttgtttgaggatagagatgtagtgttatgggtgggagttgtgttttgttttattagtgtttagattttttaaaagataatggattttattttttgaaagaataggagatgaaaattaatgtttttttgtttttgtttttttttttttttatagttttttatttggtatatagtagaaaattttttggttatatttggtgtattttgttggtggaattttttaagaatgtatttttgattttttttttttttttttttttgagatagagttttgttgtattatttaggttggagtatagtgacgtgattatggttttttgtagttttaatttttttgttaaggtattttttttttttagttttttattttttggttttgttttaatagttgggattataggtttatgttattatacgtagttattttgtgtgtgtgtgtgtgtgtgtgtgtgtgtgtgtgtgtgtgtgtgtgtgtgtgtgtgtagagatggtgtttttttgtgttgtttggattgtttataaaatttgatatttaatagttttttgtttttatttattgagaaattggttttatttttttattgaaatgggagaagtgttatttattttattgtttttttaattaattaatttttttttttttgagatggagtttcgttttgttgtttaggttggagtgttgtggcgcgattttagtttattgtaagttttgttttttgggtttattttattttttttttgttttagtttttcgattagttgggattataagcgtttgttattacgtttggttagttgttgtgtttttttggtttgtttgtttgtttttgtttttttgttttttggggttttttttttgtatttttagtagaaatggggttttatcgtgttagttaggatggtttcgattttttgattttatgatttattcgttttagttttttaaagtgttgggatttataggtatgagttattgcgtttagtttaaattaattgatttttttgagatagagttttgtttttgttgtttaggttggagtgtaatggtacgatttgggtttattgtaattattgttttttgggtttaagtaatttttttgttttagcgtttcgagaagttgaaattacgggtgtttgttattatgtttagttaatttttttgtgtttttagtagagatagggttttattatgttggtttagttggtttcgaatttttgattttagatgatttatttgttttaggttgggattataggcgtgagttattatattgggtttttatgggattattttaagttaatatttaggaatttaaattataattagtattacgtagttacgtttaagaaagtatttttggggtcgggtacggtggtttatatgtgtaattttagtattttgggaggttaaagtaggtagtttatttgagtttaggagtttaagatcgatttgtgtaatatggtgaaattttgtttttatgaaaaaagtaaaaattagtcggatatggtggtatatgtttgtggttttaattgtttgggaggttgaggtgggaggattttttgaatttgggaggtagaggttgtaatgagttgagatcgcggtattatattttagtttgggtgatagagcgagattttgttttaaaaaaaaaaaaaaaaaaaagaatttt

SEQ ID NO: 79 - DNA, 1157 bp, Artificial Sequence
  chemically treated genomic DNA (Homo sapiens)
ggattttgttttttttgaaggttttagggaagagtgttttttgtttttttcgaaggttttagggaagggtttgtttttttaggtttttggtggtttgtaggtgtagttttttaatttttttttttaagcggtttgttgtttataaggatacgagttatattggatgaggggtttattaattgatggtttttgtaaagtttttatttttaaataaggttatattgtgaggtattgggagttaggattttaatatagtttttttggtggatataatttaatttttaataacgtttatataattttaagtagggtttggtattttgtgtgttttttggagagcggttgagttaggttttggtagtgtttaggttatcggtgattgtagtttttggacggtatcgtttattataggttttggaggttgtttttacggttttttgatagggtttttgttggtttgggggtttttgattaggggagcggttttaggaggggagagattcgcgtttcgggtttagcgtagtcgtttcgagtaggatcgggatttttattaagcgggcgtcgttttacgattttcgcgcgtttttaggattattcgggtacgtggtaggtcgtttgtacgttcgcggattatttttgtgataggaaaaggtacgggttatttggtaaattaaggtatagagttttaggcggaagttgggaaggcgtcgttcggtttgtatcggtcgaagggttattcgggttaggcgtatagggtagcggcgttgtcggaggattagggtcggcgtgtcggcgtttagcgaggatgcgtagattgttttaggttcggcgtcgtcgtattgggtatgcgtcgattcggtcgggcgggaatatttcgtttcgttcgggtttcgttttagtttcgttttcgcgcgtttcggtttcgttttcgcgcgtttttttgttttttttaggttttcggtttcgtttcgttttagatttcgttttacgtcgttattttcgtgtttttcggtttcgttttcgcgtttcggatatgttgggatagttcgcgtttttagaacgttttgcgtttcgacgttcgtaggttttcgcggtgcgtatcgtttgcgatttggtgagtgtttgggtcgtttcgttttcggaagagtgcggagttt

SEQ ID NO: 80 - DNA, 1157 bp, Artificial Sequence
  chemically treated genomic DNA (Homo sapiens)
gagtttcgtattttttcgggagcgaggcgatttagatatttattaagtcgtaaacggtgcgtatcgcgaggatttgcgggcgtcgggacgtaaagcgttttaggggcgcgggttgttttagtatattcggggcgcgggggcggggtcgaggggtacggggatggcggcgtggggcggggtttagagcggggcggagtcgaggatttgagaaaagtaagagagcgcgcgggggcggggtcggggcgcgcgggggcggagttggggcggagttcgggcggggcggggtgttttcgttcgatcgggtcggcgtatgtttagtgcggcggcgtcgggtttgaggtagtttgcgtattttcgttggacgtcggtacgtcggttttggtttttcggtagcgtcgttgttttgtgcgtttgattcggatggtttttcggtcggtataagtcgggcggcgtttttttagttttcgtttgaggttttgtgttttagtttgttaaatggttcgtatttttttttgttatagggatagttcgcgggcgtgtaagcgatttgttacgtgttcgagtggttttgaaagcgcgcgggggtcgtaggacggcgttcgtttagtgagaatttcggttttgttcggggcggttacgttgagttcggagcgcgagtttttttttttttggggtcgtttttttagttagggatttttagattagtagagattttgttagggggtcgtgggggtagtttttagggtttgtggtgggcgatgtcgtttaggggttgtagttatcgatggtttagatattgttagagtttgatttagtcgttttttagagagtatatagggtgttaggttttgtttggggttgtgtggacgttattaggagttgaattgtgtttattagagaagttatgttggagttttaatttttagtattttataatgtgattttatttggagatggggattttatagaagttattaattagtgggttttttatttagtatgattcgtgtttttataggtagtaggtcgtttggggaggaggattggagggttgtatttgtaagttattagaagtttaagaggatagatttttttttggagttttcggagggagtagaggatatttttttttggagtttttagagggagtaggattt

SEQ ID NO: 81 - DNA, 5881 bp, Artificial Sequence
  chemically treated genomic DNA (Homo sapiens)
gggagatgaggtgggaggattgtttgagtttaggagtttaagattagttcggggtaatatagtgaaattttgtttgtataaaaataaatttcgggagcgtggttgagcggttggcgcggttgttttggagtaggggcgtaggaattttgatgtgaaattaatagtttgtgagttttggaatttttatttagagaagatgaaggatatcgatataggaaaagagtatattatttttagttttgggtatagaagtgtgagggagagaattagtatttttgggacgtatagagatcgtgaagattttaagtttaggagaattcgatcgttggaatgttaagatgttttggaaatagtagttcgagtcgagggttttttttttgatgtttttatgtatttttagtttagaattttggatgaggagtattttaagggaaagtattattatggtttgagtgttttgaagtttattcggattatttttaaatattagtatttagtggataatgttgggttttttttttgtatgattttttcgtggtttttttttttggttcgtgtggtttataagaagggggagtttttaatggaagacgtgtggtttttgtttaagtacgagttttttgacgtgaattgtagaagattagagagattgtggtaagaagagttgaatgaagttgggttagacgttgtttttttgcgaagggttgtgtggattttttgtcgtattaggtttattttgtttatcgtgtgtttgatgattacgtagttggttggttttagtggattagtttttatggtgaaatattttttggagtatatttaggtaatagagtttaatttgtagtatagtttgttgttagtgttgggtttttttttgacggaaatcgtgcggttttggtcgtttgtattgatttgggcgttgaattatcgaatcggtgttcgtttgcggggggttattttaattatggtatttaagaagatttttaagttaaagaatattaaagagaaatttttgggtgagtttattaatatttgttttaacgatgggtagagaatgtttgaggtagtagtcgttggtagtttgttggttggaggattcgttgttgttattttaggtatgatttataatgtaattattttgggattaataggttttttgggattagttgtttttatttttttttatttagtaatgatgtttgtattacggtttatagtatattttaggagaaaatgcgtggtcgttacggatgaacgtgtttagaagatgaatgaagtttttatttatattaaatttattaaaatgtatgtttgggttaaagtatttttttagagtgtttagaaaattcgcgaggaggagcgtcggatattggaaaaagtcgggtatttttagagtattattgtgggtgtggtttttattgtggtggtgattgttagcgtggtgattttttttgtttatatgattttgggtttcgatttgatagtagtataggtttttatagtggtgatagtttttaattttatgatttttgttttgaaagtaatatcgtttttagtaaagttttttttagaagttttagtggttgttgatagatttaagagtttgtttttaatggaagaggtttatatgataaagaataaattagttagtttttatattaagatagagatgaaaaatgttattttggtatgggattttttttattttagtatttagaattcgtttaagttgatttttaaaatgaaaaaagataagagggtttttaggggtaagaaagagaaggtgaggtagttgtagcgtattgagtattaggcggtgttggtagagtagaaaggttatttttttttggatagtgacgagcggtttagtttcgaagaggaagaaggtaagtatatttatttgggttatttgcgtttatagaggatattgtatagcgtcgatttggagatttaagagggtaaattggttggaatttgcggtagtgtgggaagtggaaaaattttttttattttagttattttaggttagatgacgtttttagagggtagtattgtaattagtggaattttcgtttatgtggtttagtaggtttggatttttaatgttattttgagagataatattttgtttgggaaggaatatgatgaagaaagatataattttgtgttgaatagttgttgtttgaggtttgatttggttattttttttagtagcgatttgacggagattggagagcgaggagttaatttgagcggtgggtagcgttagaggattagttttgttcgggttttgtatagtgataggagtatttatattttggacgatttttttagtgttttagatgtttatgtgggtaattatatttttaatagtgttattcggaaatattttaagtttaagatagttttgtttgttatttattagttatagtatttggttgattgtgatgaagtgatttttatgaaagagggttgtattacggaaagaggtatttatgaggaattgatgaatttaaatggtgattatgttattatttttaataatttgttgttgggagagatatcgttagttgagattaatttaaaaaaggaaattagtggtttatagaagaagttataagataagggttttaaaataggattagtaaagaaggaaaaagtagtaaagttagaggaagggtagtttgtgtagttggaagagaaagggtagggtttagtgttttggttagtatatggtgtttatatttaggttgttgggggttttttggtatttttggttattatggttttttttatgttgaatgtaggtagtatcgtttttagtatttggtggttgagttattggattaagtaaggaagcgggaatattattgtgattcgagggaacgagatttcggtgagtgatagtatgaaggataatttttatatgtagtattatgttagtatttacgttttttttatggtagttatgttgattttgaaagttattcgaggagttgtttttgttaagggtacgttgcgagttttttttcggttgtatgacgagttttttcgaaggatttttcgaagttttatgaagttttttgatacgatttttatagggaggatttttaataggttttttaaagatatggatgaagttgacgtgcggttgtcgttttaggtcgagatgtttatttagaacgttattttggtgtttttttgtgtgggaatgatcgtaggagttttttcgtggttttttgtggtagtggggttttttgttattttttttttagttttgtatattgtttttagggttttgattcgggagttgaagcgtttggataatattacgtagttatttttttttttttatattacgtttagtatatagggttttgttattatttacgtttataataaagggtaggagtttttgtatagatattaggagttgttggatgataattaagtttttttttttttgtttacgtgtgcgatgcggtggttggttgtgcggttggattttattagtatcgtttttattattattacggggttgatgatcgtttttatgtacgggtagatttttttagtttatgcgggtttcgttattttttatgttgtttagttaacggggttgttttagtttacggttagattggtatttgagatagaagttcgatttatttcggtggagaggattaattattatattaagattttgtttttggaagtatttgttagaattaagaataaggtttttttttttgattggttttaggagggagaggtgatttttgagaacgtagagatgaggtatcgagaaaatttttttttcgttttaaagaaagtattttttacgattaaatttaaagagaagattggtattgtggggcggataggattagggaagttttcgttggggatggttttttttcgtttggtggagttatttggaggttgtattaagattgatggagtgagaattagtgatattggttttgtcgattttcgaagtaaattttttattattttttaagagtcggtgttgtttagtggtattgttagattaaatttggatttttttaattagtatattgaagattagatttgggatgttttggagaggatatatatgaaagaatgtattgtttagttatttttgaaatttgaatttgaagtgatggagaatggggataattttttagtgggggaacggtagtttttgtgtatagttagagttttgtttcgttattgtaagattttgattttagatgaagttatagttgttatggatatagagatagatttattgatttaagagattattcgagaagtatttgtagattgtattatgttgattattgtttatcgtttgtatacggttttaggtttcgataggattatggtgttggtttagggataggtggtggagtttgatattttatcggtttttttgtttaacgatagttttcgattttatgttatgtttgttgttgtagagaataaggtcgttgttaagggttgatttttttttgttgacgaagttttttttttttagagtattgttattttttgtttggggcgggttttttatcgcgtttttttatcgaaattttgtttttttcgattttatttttcgtatagtagtttcggattggtttgtgtgttttatttttagggagagttatattttgattattgtatttattttatatttatgtaaataaaatttagtttttgtttttaattgtattttaaaaggtttagggaatcgttattataattgtattagaggtttataatgaagttttatacgtgtagttatatttatatataattttgtatatagtttatatttatagtgaaaatgtaagttgtttattttatattaaaataagtattgtgttaataatagtgtatatttttttttattatttttgtatagtttgttgtattagagatttggttttgttattagattgtaggaagagtagtattttatttttttttagttggtggttttacggtgttaggttttttgggtgtttaaaggaagacgtgtggtaatagtgggtttttcgatagttttttttgtcgtttttttatagtcgttttaggggtggttggagacgggtgggcggttggagattatgtagagcggtcgtgagtttttagggtttttgttttttgttttggtgttatttattgtttttgttaggagagtagcggggcgaagtttaggtttttttttattttttttattaatgaatggggattatagagatattttttcgagtcggggagttttttttttgtttttttttttttgttgttgtttttaaataagaattagtttatttatagagagttttattgttttaggtttttatggttggttattgtatagagttttttagttttaagatttgttggttttaagttttggagttaattgttgttttttgaggtggtatttttttatttgtttatttttatatttttatagtttagtggtagggtttaggatttcgtgggtttgttttttttttttatcgtagtcgtcgtatagtttttttttttttttttttttaaagtttgtaattttaagtagtttttgttaattagtgttttatattggcgtagaagtttttgtattgtaaagagatttattttaggttgttggttgttgtgtggtttggtgtgttttcgtaaattttttttgtgttgtggggttggtagtttaggtgggcgtggttattgttgttattagttgaatggttagcgttgtatgtcgtgattaattagatattttgtcgttttagtatgtttgttgaatattttgtggaagtaaaaatttgaaaatgtgaataaaattattttggattttgtaaaattt

SEQ ID NO: 82 - DNA, 5881 bp, Artificial Sequence
  chemically treated genomic DNA (Homo sapiens)
gagttttataaaatttaaaataattttatttatatttttagatttttgtttttataaggtgtttagtaaatatgttaaggcgatagaatgtttagttggttacgatatgtaacgttgattatttaattgatgatagtagtgattacgtttatttgagttattagttttatagtataaagggggtttgcgggaatatattaaattatatagtaattagtaatttgaggtaggtttttttatagtataaaaatttttacgttagtgtgagatattgattagtaagagttgtttaaagttgtagattttgaggggagagagagagagagattgtgcgacgattgcggtgagaaaggaaaatagatttacgaaattttgagttttgttattgaattgtggaggtgtgggaataggtaaatgaaaaagtgttattttaaaaagtagtagttggttttagggtttggaattaataggttttggagttggagagttttgtgtagtggttagttataggaatttgaggtagtgggattttttgtggatagattgatttttgtttagaaataatagtaaaaagaagaaggtaggaaagaaatttttcggttcggaggaatgtttttgtgatttttatttattgatggagggagtgaaaaggggtttgggtttcgtttcgttgtttttttgatagaaatagtaagtgatattaggatagaaggtaggagttttgagaatttacggtcgttttgtatggtttttagtcgtttattcgtttttagttatttttggagcggttgtggggaggcggtagagggggttgtcggagggtttattattgttatacgtttttttttggatatttagaaaatttggtatcgtgaaattattagttagagaagaatgaaatgttattttttttatagtttaatagtaaaattagatttttagtatagtaaattgtataaaaatgatagaaaggaatatgtattgttattagtatagtgtttattttaatataaaataaatagtttatatttttattgtaaatataggttatgtatagaattatatatagatatagttatacgtataaagttttattataggtttttgatataattataataacggttttttgaattttttagagtgtaattaagaataaaaattaaattttgtttatatgaatatggaataaatataataattaaaatatgattttttttaaaagtgaaatatataagttaattcggaattgttgtgcgaaagataaaatcgagaaaggtaaggtttcggtaggaggacgcgatgaggggttcgttttaggtagggaatggtaatgttttaaagaaaagagatttcgttaatagggaggagttagtttttgatagcgattttgttttttgtagtagtaaatatggtatagaatcgggaattgtcgttggatagaaggatcgatggggtgttaaattttattatttgtttttgggttagtattataattttatcggagtttagaatcgtgtgtaggcgatgggtaatggttagtatggtatagtttgtaaatgtttttcggatggttttttgaattaataagtttgtttttgtgtttatggtagttgtggttttatttaaaattagaattttatagtggcggagtagggttttagttatgtataagagttgtcgtttttttattgagaagttatttttattttttattattttagatttaagttttagaggtagttgagtaatatatttttttatgtgtgttttttttagggtattttaaatttggtttttagtgtattggttgaaggggtttaaatttgatttgatagtgttattgaatagtatcggtttttgaggaatgatagagagtttgtttcggaggtcggtaaggttaatattattgatttttattttattaattttgatgtagtttttagataattttattagacggaagagggttatttttagcgaggatttttttgattttgttcgttttataatgttaattttttttttaggtttgatcgtgaaggatattttttttaggacgagagggaggttttttcggtattttatttttgcgtttttaaaggttattttttttttttggggttagttaggggagggagttttgtttttaattttggtaggtgtttttaaggatagagttttaatgtagtgattgattttttttatcgaggtgaatcgagtttttgttttagatgttagtttgatcgtaaattggaatagtttcgttaattggatagtataagagatggcgagattcgtataggttgggggaatttgttcgtgtataagaacgattattagtttcgtggtggtgatgagggcgatgttgatgaggtttagtcgtatagttagttatcgtatcgtatacgtaaataaaaaaaaaggagtttggttgttatttagtagtttttggtatttgtgtagaaatttttgttttttattgtaggcgtggatggtggtaaggttttgtatgttggacgtgatgtgggagaggaaaggtgattgcgtgatattgtttagacgttttagttttcgaattaggattttggagataatgtgtaggattgaaaagaggatgataaggggttttattgttataaggaattacgggaagatttttgcgattatttttatatagaagaatattaggataacgttttggatgaatatttcggtttggaacggtagtcgtacgttaattttatttatgtttttggaaaatttgttgagaattttttttgtgggggtcgtgttaaaaaattttatagggtttcgaaggatttttcggaaaagttcgttatgtagtcgggaggaagttcgtagcgtgtttttgataaagataatttttcgaatggtttttaggattagtatgattgttatggagagggcgtagatgttggtatagtattgtatatgaggattgttttttatgttgttatttatcgaggtttcgttttttcgagttatagtggtgttttcgtttttttgtttgatttagtaatttaattattaggtgttgaaggcggtgttgtttatatttagtatgaaaagggttataataattaggaatgttaaggggtttttagtagtttggatgtagatattatatattgattagggtattgaattttgtttttttttttttagttgtataagttgttttttttttggttttattgttttttttttttttattgattttgttttaggatttttgttttgtgattttttttgtgaattattggtttttttttttgaattgattttaattggcggtgttttttttagtaataggttattaaaaatggtagtatagttattatttaaatttattagttttttatgggtgttttttttcgtaatatagtttttttttatgaagattattttattatagttaattaggtattgtaattggtgggtaataaatagaattgttttggatttgagatgttttcggatagtattattgaagatgtggttgtttatatgggtatttaaggtattgagggggtcgtttaggatgtagatgtttttgttattatataaggttcgggtaaggttgattttttggcgttgtttatcgtttaggttggtttttcgttttttaattttcgttaggtcgttgttgggaagaatggttaggttaggttttaggtagtagttgtttagtatagagttgtatttttttttattatatttttttttaaataggatgttgttttttagagtagtattgaggatttaggtttgttgggttatataagcgaaggttttattgattgtaatgttgttttttagaagcgttatttggtttaaaatggttgaaatgagagaggtttttttattttttatattgtcgtagattttaattagtttatttttttggatttttagatcgacgttgtgtagtgttttttgtaagcgtaggtggtttaggtggatgtgtttgtttttttttttttcgggattgggtcgttcgttattgtttaggaggaggtggtttttttgttttgttagtatcgtttgatgtttagtgcgttgtagttgttttatttttttttttttgtttttggaagtttttttgtttttttttattttgggggttagtttgggcgagttttggatattggagtgggaggagttttatgttaaggtggtattttttatttttattttgatgtgaggattggttggtttgttttttattatgtgaattttttttattagaaataaatttttaaatttgttaatagttattgaggtttttgagagggattttattgaaaacggtgttatttttaaagtaaaagttatggaattgaagattgttattattgtgaaagtttgtgttgttgttagatcgaagtttagggttatatgaatagagaaggttattacgttggtaattattattataatgggagttatatttatagtgatgttttggaagtattcggttttttttaatattcgacgttttttttcgcggattttttgaatattttgagaaaatgttttgatttaggtatatattttgataaatttaatgtaagtaagaattttatttattttttggatacgtttattcgtggcggttacgtatttttttttgaaatatgttgtgagtcgtgatgtaaatattattgttgggtaaaagaggataaaaatagttgattttaggaagtttgttggttttagaataattatattataaattatgtttaagatggtaataacgggttttttagttagtaggttgttaacggttgttgttttaaatattttttgtttatcgttggagtaaatgttgatgagtttatttagggatttttttttaatgttttttaatttaaggatttttttaaatgttatggttaggatggtttttcgtaagcggatatcggttcggtaatttaacgtttaagttagtgtaagcgattaagatcgtacgattttcgttaggaggaggtttagtattaataataagttgtattgtaggttagattttgttgtttgggtatattttaagaggtgttttattatgaaggttggtttattgaagttagttagttgcgtgattattaggtatacgatggataggatgagtttggtgcggtagaagatttatataatttttcgtagggaagtagcgtttggtttaattttatttagttttttttgttatagtttttttagttttttgtagtttacgttagaagattcgtgtttggatagagattatacgttttttattgagagttttttttttttgtgggttatacgggttagagaagaaagttacgaaaaagttatataggaaaaaagtttagtattgtttattgggtgttggtgtttggaagtagttcggatgggttttagagtatttaagttatgatggtatttttttttgggatgttttttatttaggattttgagttgagaatgtatggaggtattaagagagaggttttcggttcgggttgttgtttttaaggtattttggtattttaacggtcgagtttttttgaatttggaatttttacggtttttgtgcgttttagaagtgttggtttttttttttatatttttatatttaggattggggatgatatattttttttttatgtcgatattttttattttttttgagtggaggttttagggtttatagattgttagttttatattagaatttttgcgtttttgttttaggataatcgcgttagtcgtttaattacgttttcgagatttatttttgtatagatagggttttattatgttgtttcgggttggttttgaatttttgggtttaagtaatttttttattttatttttt

SEQ ID NO: 83 - DNA, 1092 bp, Artificial Sequence
  chemically treated genomic DNA (Homo sapiens)
aagttttttttttattatttaagaaggtatttaggtttttttgtgttaggttttaggtaaagtgttggattatttagtaattgggtttagtagtaggatggttttagattgaggttttagggttaaaggattatttttttttttagcgttggttcgggaaaggtaagtttcgggcgggagcgtacgtcgcgttttcgaagtttggttttttcgttacgtttattttttgtttttatttcgcgtttttttaggttttttttcggtgaatcggatgttttgttagttttttattttgcgttttcggtcgcggttcgggtttttcgtaaagtcgttgttatttcggagggtttagttagcgggttttcggaggttggtcgggtaggcgtggtgcgcggtaggagttgggcgcgtacggttatcgcgcgtggaggagatattgttttgtcgcgatgggggttcggggcgtttttttacgtcgtaggtaagcggggcggcggttgcggtatttgtttatcgggagttttttttttttttttttgttgttgttgttttgtatttagttcgggggaggatagaagaaaaaggaggtagaatggatttttttggtttttttttgtggtcgggggcgggttagggtgggtcgcgttgtttaggtagttttgtcgtgttgttaggtagtttggtcgtcggcgtgggcgatgtcggcgttggggcgggagtcgcgagggtgggaggttttggggcgttttcgggacgtggagttagtagggttttgatttgaaaaacgacggtaaagcgtgtttttgattgtttttgagtattttatattttttagatttagggcgtttttatttttagttggaagtttagtttagagtaatggtgttattaaaaggggtgtgttggatgtgaaaatattttttggaagtatttataagtttgtaggaaatatgttttttttatttttttattttgttttttttattatttattttaagaagtaatagaatttgtgtagagtgtgttttaagttatattgtatgtttatttttgtttatgttgaattcggtgtatatttgtgagaataagttt

SEQ ID NO: 84 - DNA, 1092 bp, Artificial Sequence
  chemically treated genomic DNA (Homo sapiens)
aagtttatttttataagtatatatcgagtttaatataaataaaaataaatatatagtgtaatttaaaatatattttgtataggttttgttgttttttgaaatgggtaatgaagggagtagagtaagaaaataaggaaaatatattttttgtaggtttataaatatttttaaagggtatttttatatttaatatattttttttagtggtattattgttttaagttgggtttttagttgggaataaaggcgttttgggtttgaaaggtgtgaggtgtttagaagtagttaagaatacgttttgtcgtcgttttttaagttagaattttgttaattttacgtttcggaaacgttttagggttttttattttcgcggttttcgttttagcgtcggtatcgtttacgtcggcgattaggttgtttagtaatacggtagggttgtttgggtaacgcggtttattttggttcgttttcgattataggggaaggttaaggggatttattttatttttttttttttttgttttttttcgagttggatgtagagtagtagtagtaggagaaggaagggaaagttttcggtgggtaggtatcgtagtcgtcgtttcgtttgtttacggcgtgaaggagcgtttcgggtttttatcgcggtagggtagtgttttttttacgcgcggtagtcgtgcgcgtttagtttttatcgcgtattacgtttgttcggttagttttcgggagttcgttggttgggtttttcgggatggtagcggttttgcgagggattcgggtcgcggtcgaggacgtagagtaggagattgatagagtattcggtttatcgggagaagatttggaaaggcgcgggatgggggtaggaagtgggcgtggcgagggagttaggtttcgggggcgcggcgtgcgttttcgttcggagtttgtttttttcggattagcgttgaggagaggagtggttttttggttttgggattttaatttgaggttattttgttattgaatttaattattgggtagtttagtattttatttggggtttagtatagaaagatttgaatgtttttttggatgatgaaggggaagttt

SEQ ID NO: 85 - DNA, 3647 bp, Artificial Sequence
  chemically treated genomic DNA (Homo sapiens)
tatggtttagtttttagtttagttttgtgattttgggaaagtttttttagttcgtggaattttaaggtttaaggttttttttttgtaaaatggggaatgataatatttgttttttttggagttttggggatttagtgttttgaggaacgtggttgtaggttagagtggtatagagtagggtttaatgaagtatggcgtttatagtagtttttttgattggattaattttttcggatataatagtagggtaggggtggggtttggggagaaaggatatttttaattttgattttaatatttcgatggtttttaaggttgtttgtatatttatttaggtgtaagttttttaaggtgtggtgtgatgaattagtgatttttggagttaggttagcgtatttttttttcgtagggttgtaagttgtaggattgagaggtaggttgattaggttttgggttggatgatggggtgagagtaaggggttagttttgatatatgtttaatttttttttttagttttaagatattttgggtaaattgtttattttagtttttttgatttttattttaattttaatattagtttaagagaaaatagggatattgatggttatttagaagggttgttgtgttttatatatagtaatatttttcgaatgtttgtgatagcggtttaaggaataagttaattttatattattattttggatatttgtataaaattttattttatttttattatatgaatgtgttagggttgtttttttgttttgttttttttttttttttttgagatagagtttcgtttttgttgtttaggttggagtataatggcgcgattttggtttatcgtaattttcgttttttaggtttaagcgatttatttgttttagttttttcgagtagttgggattataggatgcgttattatgttcggttaattttgtgtttttagtagagatagggtttttttatgttggttaggttggtattaaattttcgattttaggtgatttatttgttttggttttttaaagtgttgtaattataggtatgagttatcgtatttagtcgtgttagggtttttttttgtttaatttttttttttttttttagtttttttttgtttgttttaatggagttttattttgttatttaggttggagtgtagtggtaagatttagtttattgtaatttttgttttttgagtttaagtaatttttttgttttagtttttcgagtagttgggattataggtgtttgttattatatttagttaatttttgtatttttagtagagatggggttttgttatgttggttaggttggtttcgaatttttgatttcgtgatttgtttgttttggttttttaaagtgttgggattataggtatgagtcgttatattcggttaatttttgtattatttttttaaagagagttttttaaattatataagttttaggttttataaaatttagatttgttttagtataattaaatttgggattatttattgagtaattattatgtgttaagtattgcgttgagtgtttttagagtattattttttttaattttagtatagtatgttagatgttgttttatagatgagttaattgagattagagatgtttagttatttgtttaaggtgatatgattgatatggaatagagttaagatttttttttttttttttgatacggagttttattttgttttttaggttggagtgtagaggcgtaattttagtttattgtaagttttgttttttaggtttacgtatttttttgttttagttttttgagtagttgggattataggtattcgttattatatttggttaattttttgtatttttagtagagatagggttttatcgtgttagttaggatggtttcgattttttgatttcgtgatttgtttgtttcggttttttaaagtgatggaattataggtgtgagttatcgcgattggttagatttaagatttgaatttaggtttttttggttttagaggtttttgttttttaattttttagtatgtatacgtatttgtttttttagaggtgtttgtttaagtgtgtttagtatatggaagtaagttagaaatgttaggtatatttgtaaagaggtgtgggagatgggggggagggaagagagaaagagatgttggtgttttttattttttagtttttgataggtgtttttgatttttttttgattagtatagttgtatttttggttggggtattttaattagaattgttaaatttagtatataaaaataaggaggtttagttaaatttgaattttagataaataatgaataatttgttagtataaatatgttttatgtaatattttgttgaaattaaaaaaaaaaaaaaaagttttttttttatttttatttttattattaggtttaaggaatagggttaggggttttaaatagaatgtggttgagaagtggaattaagtaggttaatagaaggtaaggggtaaagaagaaattttgaatgtattgggtgttgggtgtttttttaaataagtaagaagggtgtattttgaagaattgagatagaagtttttttgggttgggtgtagttgttcgtggttgtaattttagtattttgggaggttgaggcgggaggattatttgagtttgggagtttaagattagttttattaacgtggagaaattttgtttttattaaaaatataaaaaatttagttggttatggtggtatatgtttgtaattttagttgttcgggaggttgaggtaggagaattatttgaattagggaggtagaggttgtggtgagtagagatcgcgttattgttttttagtttgggtaataagagtaaaagttcgtttaaaaaaaaaaaaaagttttttcgatgtgattgtttttttttaaatttgtagatttttttaagattatgttttttagatattttaaagattttagaagatatgtttcgggggttttggaagttataaggtaaatataatatatttttttttttgattattaattttattagaggatgtggtgggaaaattattatttgatattaaaataataggtttgggatggagtaggatgtaagttttttaggaagttagataattgagatttaaagggtgttaagagtggtagtttagggaaatttatttcggatttcgggggagggggtagagttattagtttttgtatttagggatttttcgaggaaaagtgtgagaacggttgtaggtaatttaggcgtttcggcgttaggagggacgatttaggtttgcgcgaagagagggagaaagtgaagttgggagttgtcgatttttagatttcgttggaatgtagttggagggggcgagttgggagcgcgtttgtttttaattatcggagaaggaggaggtggaggaggagggttgtttgaggaagtataagaatgaagttgtgaagttgagatttttttttattgggatcggagaaattaggggagtttttcgggtagtcgcgcgtttttttttacggggttttttattgcgtcgcgcgttcggtttttatttttcgtagtatttcgcgtttcgcgtttttttagtcgggtttagtcggagttatggggtcggagtcgtagtgagtatt

SEQ ID NO: 86 - DNA, 3647 bp, Artificial Sequence
  chemically treated genomic DNA (Homo sapiens)
ggtgtttattgcggtttcggttttatggtttcggttggattcggttgggagggcgcggggcgcggggtgttgcgaggggtgggggtcgggcgcgcggcgtagtaaagggtttcgtgggaaggggcgcgcggttgttcggggggtttttttggttttttcggttttaatggaggggaattttagttttataattttatttttatatttttttaagtagttttttttttttatttttttttttttcggtgattgggagtaagcgcgtttttagttcgttttttttaattgtattttaacgaagtttgggagtcggtaatttttagttttatttttttttttttttcgcgtaggtttgggtcgttttttttagcgtcgggacgtttgggttgtttgtagtcgtttttatattttttttcggagaatttttaaatgtagaggttggtgattttgttttttttttcggagttcgggataaatttttttaggttgttatttttaatattttttaagttttagttatttaattttttggggagtttgtattttattttattttaagtttattgttttaatattaaataatggtttttttattatattttttagtaaaattgatagttaaggagggggatgtgttgtgtttattttgtggtttttaggattttcggggtatattttttggaatttttgaagtatttgaaaagtatgattttaagagggtttataaatttgggaggagatagttatatcgaaaggatttttttttttttttaaacgaatttttgtttttgttgtttaggttggagagtaatggcgcgatttttgtttattataatttttgtttttttggtttaagtgatttttttgttttagtttttcgagtagttgggattataggtatgtgttattatgattagttgaattttttgtatttttagtaaagatagggtttttttacgttggtgaggttggttttgaatttttaagtttaggtgattttttcgttttagttttttaaagtgttggaattataattacgagtaattgtatttagtttaaaaagatttttattttaattttttaaaatgtattttttttgtttatttaaggaggtatttagtatttaatgtatttaaggttttttttttgttttttgttttttattagtttgtttaattttattttttaattatattttatttggagtttttgattttattttttaggtttagtggtaggggtggggatggaaggaagatttttttttttttttttaattttaataagatattgtatgggatatatttatattaataaattatttattgtttatttgaaatttaaatttaattgggtttttttatttttatgtgttaaatttggtagttttagttggaatgttttagttaagaatgtagttatattggttaagaagggattaaaggtatttattagggattggagaatgaaggatattagtatttttttttttttttttttttttttattttttatatttttttataggtatatttagtatttttaatttgtttttatgtgttgagtatatttaagtaggtatttttagagggataggtgcgtatgtatgttagggagttgagaaataggggtttttgggattaagaggatttgggtttaaattttgaatttggttagtcgcggtggtttatatttgtaattttattattttgggaggtcgaggtaggtagattacgaggttaggagatcgagattattttggttaatacggtgaaattttgtttttgttaaaaatataaaaaattagttaggtgtggtggcgggtgtttgtagttttagttatttaggaggttgaggtaggagaatgcgtgaatttgggaggtagagtttgtagtgagttgagattgcgtttttgtattttagtttgggagatagagtgagatttcgtgttaaaaaaaaaaaaaaaaattttgattttattttatattagttatgttattttgggtaagtgattgagtatttttggttttagttggtttatttgtaaaatagtatttgatatattatgttggggttaaaggagataatgttttggaagtatttagcgtaatatttggtatataataattgtttaataaatggttttagatttagttatattggggtagatttaggttttgtggggtttgaagtttatataatttgggaaattttttttaagaaagtaatataaaagttggtcgagtatggcggtttatgtttgtaattttagtattttgggaggttaagataggtagattacgaggttaggagttcgagattagtttggttaatatgataaaattttatttttattaaaagtataaaaattaattaggtgtggtggtaggtatttgtaattttagttattcgggaggttgaggtaggagaattgtttgaatttagagggtagaggttgtagtgagttgagttttgttattgtattttagtttgggtgatagagtaagattttattgaaataaataaagagaggttaaagagagagaaaggaattgaatagaaaaagattttagtacggttgggtgcggtggtttatgtttgtaattgtagtattttgggaggttaaggtaggtggattatttgaggtcgggagtttggtattagtttgattaatatggagaaattttgtttttattaaaaatataaaattagtcgggtatggtggcgtattttgtaattttagttattcgggaaggttgaggtaggtgaatcgtttgaatttgggaagcggaggttgcggtgagttaagatcgcgttattgtattttagtttgggtaataagagcgaaattttgttttaaaaaaaaaaaaaaaaaataaaataaaaaaataattttagtatatttatatagtaaggataaggtggagttttgtataggtatttagagtgataatgtaaaattaatttattttttggatcgttgttataaatattcgagaaatattgttgtgtatggaatatagtagtttttttggatggttattaatatttttatttttttttgagttggtgttagggttagggtgaggattaggggaattgaggtaagtaatttgtttaggatgttttagggttagagagaaaagttgggtatgtattaaaattgattttttatttttattttattatttagtttaggatttggttaatttgttttttagttttgtagtttatagttttgcgggaagaggatgcgttgatttggttttaggagttattggtttattatattatattttggagggtttgtatttggatgagtgtgtaggtagttttagaggttatcgggatgttaggattagggttagaggtgttttttttttttaggttttatttttgttttgttgttgtgttcggaaaggttagtttagttaggaaagttattgtggacgttatgttttattggattttattttgtgttattttgatttatagttacgttttttagaatattgagtttttaagattttagaggaggtaggtgttattattttttattttgtagaagaggaattttgagttttgagattttacgagttaaaggaatttttttaaggttatagagttgagttgggaattgagttatg

SEQ ID NO: 87 - DNA, 2205 bp, Artificial Sequence
  chemically treated genomic DNA (Homo sapiens)
ggatttttagtaggggagtaatatggatttggaaagattattttggttgttgtgtggggatagataagacggtgggagtttagaaaggaggttgggttggaaattttgggatagaaatttagagaggaaaagattgggtttggggtttttagtgagtattagggagtggggaattagtaggagtttggtttttatttatttttttttttttttttttttttttttttgtaggttggtttcggttttatttttaggtgtggttttaggatagttttggtcgttgttagtttgtaggttatggattttgttatgtgtttagtagttcgggtatttattagttggtttgttttacgtggcggtttttgggtagttggcgagaatagttggtacgggttttcgtgggtggtgggtcgtagttgttgtatggggatattatttatagtggggtcgatcgttatcgtttgtatatagttgttggtggtatcgtgtatttggagatcggtttgttgtttcgtaatttcgatcgttacggcgtggagtgttgagggattttgtttttaacgttattattatttatatttcggatatttagtgatgggggaggatggtatagtggttaagagtatagattttagagattgttagagttgattttagttaaggtatggtatcgtttttgttttttttaggatttcggggtttttttgggtttagtttttttatttgtaaattggggatagtaaatgtatggggtcgtagggtgttgagtgataggaggttgtttagttatatgggaggtgtttagtaaaggagagtaatttttataggtgtttgttttttgatttttttattttttaggtgttttgttgttttttttttttattgatatttttcggaggtttttatgttgatagatttttttttttttattttgttttttagtttgatttttttttcgttttgggttttttttttttggtcggtttttttgtgttttatttttcggattaagtttttttcgtttggttttttttttttggtgatttatatcgttcgtaaagttatagcgtatttggattattcgttttggtggcgtttggtcgttaggaggtagtattttgtttgcggggcggagtcggggagttcgtttttttttttttagggttgaagggatttttttcggagttcgtttacgcgagatgaggacggtggtttagtttttttatgttttttttttgggggtcgttttcgttttcgtttcgtgcgttttttgggtggggtcgggggcggttttaaaattttttgtcgatttagtcggttttcgtcgtcgtcgtttttcgcgttttgggttattttttttttattttttttcgcggagtagttagatagcgagggtttcggtcgggggtaggggggacgtttcgttcggggtattttttcggttttgagtcgttcgcggggtcggtttcggttcggagcggaggaaggagtcgtcgaggagtagtttgaggttttagagtttgagacgagtcgtcgtcgttttcgttattgcggggaggagggggaggaggagcgggaggagggacgagttggtcgggagaagaggaaaaaaatttttgagattttttcgttgtcgttgggagtcggaggcgcggggattttttggcgcgacgttgtttcgcgaggaggtaggatttggggattttagatcgtttttttttgtcgtcggggacgtttgttttttttttgttttttatacggcgttttttaggcgtttttatttcggattagttttcgggagtcgtcgattcggtttttcgtaaagatttttttttagatttcgggcgtattttttgtacgtcgtttttattttcggtttgttttttgagttttcgcgtattttagatttttttttttttaggagacggattttttttcgatttgttatagattttttatttaagattatttattttttggtattagatcgcgtttatttaggttattttcgtgggatattgagatattttcggtttaagttttttttttattattgcgtttttttttttgaggagttttagttttttttcgaggtttttttattttttgtcgggagatttttagtttttgtaggggcggggtttttttattatattagttttgttcgcgttttcggtagtgtcggggggcgtcgttttttttatg

SEQ ID NO: 88 - DNA, 2205 bp, Artificial Sequence
  chemically treated genomic DNA (Homo sapiens)
tatgggggaggcggcgtttttcggtattgtcgagagcgcgaatagggttggtgtggtggggaggtttcgtttttgtaggggttgggggtttttcggtaaaaggtaggagggtttcgagggaaagttgaggttttttagggagaagggcgtagtggtggaggggaggtttggatcgggggtgttttagtattttacggaaataatttagatgggcgcgatttggtattagaaggtgggtggttttgaataggggatttgtggtaggtcggagagagattcgttttttggaggagaaagggtttaggatgcgcgggggtttaggagataggtcggggatgaaggcggcgtgtagggggtgcgttcgaggtttggggaaaagtttttgcgggaggtcgggtcggcgattttcgagggttggttcggaatgggggcgtttgagggacgtcgtgtagggggtagggagggagtaagcgttttcggcggtaaagggaggcggtttggggtttttaagttttgttttttcgcggggtagcgtcgcgttaagaggttttcgcgttttcggtttttagcggtaacggaaaagttttaaaagtttttttttttttttttcgattagttcgttttttttttcgttttttttttttttttttttcgtagtggcgggggcggcggcggttcgttttagattttggggttttaggttgtttttcggcgattttttttttcgtttcgggtcgaggtcggtttcgcgggcggtttagagtcgggggggtgtttcggacggggcgttttttttgttttcggtcggggttttcgttgtttggttgtttcgcggagggaggtgggagggagatggtttagggcgcgaagggcggcggcggcggggatcggttgggtcggtagggggttttgaagtcgttttcggttttatttaggaagcgtacggggcgggagcgggggcggtttttagggggagggtatgggggggttgggttatcgtttttatttcgcgtgggcgggtttcgaggggggtttttttagttttgggggaaagggggcgggtttttcggtttcgtttcgtaaatagggtgttgttttttggcggttaagcgttattaaagcgggtgatttagatgcgttgtggttttgcgggcggtgtgggttattagagaaagaggattaggcggagaaggtttaattcgggggatgagatataggggagtcgattagaggagggggatttagaacggaaggagagttaggttgggaaataaggtaggagaaggagggtttgttaatatgggggttttcggagggtgttagtgggaggagggggtaataggatatttgagggatggaagggttaggaggtagatatttgtaagaattgtttttttttattgagtattttttatgtggttaagtagttttttgttatttaatattttgcgattttatatatttattgtttttaatttatagatagggaaattgggtttagagggatttcgaggttttagaaaggatagaagcggtgttatgttttagttggggttagttttgatagtttttagagtttgtgtttttgattattgtgttatttttttttattattgggtgttcggggtgtggatggtggtgacgttggaggtagagttttttagtattttacgtcgtagcggtcgaagttgcggagtagtaggtcgatttttaggtgtacggtgttattagtagttgtgtgtaggcgatagcggtcggttttattgtagatggtgtttttatgtagtagttgcggtttattatttacgaaagttcgtgttaattgttttcgttaattgtttaggggtcgttacgtggggtaggttagttggtgggtgttcgggttattgggtatatggtaaaatttatagtttgtaagttggtagcggttaaagttgttttgggattatatttggaaatggagtcggggttagtttgtaggaaaggagagagaggggaaaggagggatgggtggggattagatttttgttgattttttattttttgatatttattggagattttaggtttagtttttttttttttgggtttttgttttagagtttttaatttagttttttttttaggtttttatcgttttatttatttttatatagtagttaaagtgatttttttaaatttatgttatttttttgttaaggattt

SEQ ID NO: 89 - DNA, 3037 bp, Artificial Sequence
  chemically treated genomic DNA (Homo sapiens)
gaattttcgaaattttttttgtagaaaattttggaaggtgtttgttatattgattttggaatgtgtgtttatttggggttatataaatttgttttgtggaagttatttgaagttaggaagagatggagggtattttttaggagtgagatgagattttattatatttgattgtttagtattatttttgagtgaggggattaaaaaatttattttttaaattaggatatttttaagagtggaagggggatttattaatatttttatttggataagaggtaaatattagaatgttttcgatgaaggggatatataatggatttttttgatgtgaaatttgttagatgggttggaaagttcgtatattgggataagtatgatttgagttgtttgggataaggataggggtataagagaaggaaatgggtaaagagagaagtttgtatttagttaagggtgtagagatgttatatatgattgttttttagggaatcgggtttttagtttatattttagttgtttaattattttttttttgaattgattgttttttttttggaattttaggtttgattttattttttggtttttttagtttacgatttttttgattcgatttttttttttagaatttagtcgtttgaatttttagtttgtggtttttttttaggttttagttttttttgtttttgattgaaatagtagtattttttaagttttgggggttttttcgggttttagtttcgatttagaattcgttcgttgtttgttacgttgttattgtcgttttttttataaagggatttgagcgttcgggtttaggggtttcgtatagtaggtgaggtttttttgttttatttttttgggttgttcgtgtttcgtgttttggattatcgtttagtagtgttttgttttttgtttgggtttcggttttttttgtatttgttgtttggattttcggtttgtttgggtttgggttttggtgggtttggttttggtttttttttttgtttttgattttttatttgttagttttattgtttttgttatatattttttgtttttgttatggtttttttttgttttttttttgtttttttttgtttttttttgtttattttggggtttttttgattgtattttgtttttttttttgtcgatttttttttcgggggtcggggggtgttgttttttagggcgggaggtttgtttttcgtcgcgtgtttcgtttcgtttattgtttttttttttttttttttttttttgtaggttttttttatgatattatttgaacgttttttttttttaagggtgtgtggtattattttatattttttttttttggggttgttgttggttttgttgtttggggtttaggtgaggtagtaggagaatgggggttgttggggtggtttagttaaattttgagttttagagttttttttaattttgtttttttttaggggttttttggtgttggttttatatttttagttgtttagattgttcgttagtattttaagatgtattttgtttatagtaattttaaatttgttgtttattttattggtaaatatttatttgattttttagatatgtttttattagttttttttttatttttgttttaggaatttaagtatttattttttttttttaattttttttacgttaaaaaaaatagagggagtttatttttatgtttttttttgttattttttaggaatttagttgtttagtgtttatttttttagggattgagatttttgatttagatttttgattttttatttttattttttatggttttttttaggagattttagtaagtagaatttattgttttggagagtaaatacggatcgtgtttttttttaggatggtttttttttgagtaataatttttttttggtttttattagtggtatttatttcgtttatttttaggtggttttttttgggaaagtttatttttttaaggttattttttttttattttatttggtttatgaggtttagtttttttttttttagtattttttttatgtgtttttttttagtttttagaagatggtgtatttagggttgtaggaattttggttgtattcgatgtattacggggttgcgttttagtttatttagggagattagttatttatttatatagatggtattttttatttagtttttagttttagtattgttttttttggagttttcgttttgtagaatttggaaaaatttagaaagaaaaaataattgattttaagattttttttttattttgtttttattttgattattttaggggtcgttattattttttttttggttattttaatagtttaagttttttttgattaagttatcggagtttttaaagaaggaattttaggtattttaggggattatatttttttgaattatttttgatgtttgtttggttgaggattttaagtttgtttaggaatttttagtttaaagttgttggttttgtttattagttaggtggggtttagatttatatatagaggaagagtaggtatatggaggagtttgggggatgattagaggtagggaggggattatttatgaaggtaaaaaaattaaattatttatttatggaggatggagagaggggaataatagaagaatatttaaggagaaatagagataggtttaagagatgaagagtgagagggtatgcgtataaggttgattaagagagaaagaagtaggtatgagggattatagggttttagaaggtagggaaaggttttgaaagttagttgtcgattagagttttatacggaggtatttgtattttcgatgaagtttaataaattttttttttttgaaatgttgtttgtttgtgtgtgtgtgtttgggagtgagaattttttagtttatttaaggaatggagggagggatagagggtttaaagggagtaagagttgtggggagaataaaaggataagggtttagagagttttagggatatgtgatggatttattaggtgaggtcgttagattgttgtag

SEQ ID NO: 90 - DNA, 3037 bp, Artificial Sequence
  chemically treated genomic DNA (Homo sapiens)
ttgtagtagtttggcggttttatttggtgagtttattatatatttttgaagttttttgagtttttatttttttgttttttttatagtttttgttttttttgagttttttgtttttttttttattttttagatagattgggaagtttttatttttagatatatatatataagtagatagtattttagagaaaagaggtttattgggttttatcgagggtgtagatgttttcgtgtggggttttggtcggtagttggtttttagagtttttttttgttttttggggttttgtgattttttatgtttattttttttttttttggttagttttgtgcgtatgtttttttattttttattttttgggtttgtttttgtttttttttggatgtttttttattatttttttttttttattttttataaataaataatttaatttttttgtttttataaatagttttttttttgtttttagttattttttaagtttttttatgtgtttgttttttttttgtgtgtggatttaggttttatttagttggtggataagattaatagttttgggttgggaatttttaggtaggtttgaaatttttagttagatagatattagggatggtttagggaggtgtggttttttgggatgtttagaattttttttttgaaagtttcggtgatttgattagggaagatttgagttgttggaatggttaaaggagaggtggtgacgatttttgaaatggttagaatggaggtagaatggggagaaggttttgaaattaattattttttttttttggatttttttaagttttatagagcgaaggttttaaagaagatagtattagggttgaggattaggtgggggatgttatttgtgtgggtggatagttggtttttttgggtgagttggaacgtagtttcgtggtatatcgagtgtagttagggtttttgtagttttggatatattattttttgggagttgaggagaggtatatggaaggggtattgggaggagaagagttggattttatgggttaggtagagtggggaggaggtggttttgggagagtaggtttttttagagaagattatttgggagtagacgaagtagatgttattggtggggattaggagagaattgttgtttaaggagaaattattttggaggaaggtacggttcgtgtttgttttttagagtagtgagttttgtttgttggggttttttaggaagagttataggggatgggggtgggagattaggggtttggattagaggttttaatttttgaggaagtgggtattgaataattgagtttttgggggatggtagggggaggtataggagtgggttttttttgttttttttagcgtgggggaagttgggggagaggggtggatgtttgggtttttgaggtaggggtaggaggagagttggtggggatatgtttgggaggttaggtggatgtttattaatgaggtgagtagtaggtttgaggttgttgtgggtaagatgtattttggggtgttgacgggtagtttgggtagttgaaggtgtgaggttaatattagggagtttttaggggagaatagagttgaggggggttttagggtttaaggtttggttgagttattttagtagtttttatttttttgttgttttatttgggttttaggtagtagaattagtagtagttttagaaggaggaggtgtagggtggtgttatatatttttgggaggaagagacgtttaggtggtgttatggggagaatttgtagagaaagagagagagagagagagatagtgagcggggcggggtacgcggcggaagatagatttttcgttttgggagatagtatttttcgattttcgagagagagatcgatagagaaggggataagatgtagttagagaaattttaaggtgagtagagggagatagagagagataggaagggaatagagaggaattatggtagaaatagagaatgtgtgatagagataatgagattgatagatggagagttagagatagagaaggaaattaaaattaaatttattaaggtttaggtttaggtaggtcggggatttaggtagtaggtgtaggagggatcgaggtttaggtagagggtaggatattgttgggcggtagtttaaagtacgaagtacgggtagtttaaggagatggggtaggagagttttatttgttgtgcggagtttttgggttcggacgtttaggtttttttatagaggaagcggtagtggtagcgtggtaggtagcgggcgggttttaggtcggggttggggttcggggaagtttttagggtttagaagatattgttgttttagttaaaggtaggaaaggttgaggtttaggagagaattataggttgggggtttaggcgattgagttttgggaaagggagtcgggttaggggaatcgtgggttgggagggttagggagtggggttaggtttagagttttaaagaagggatagttaatttagagaggaggtggttgagtagttggggtgtgagttggaggttcggttttttgaagagtaattatatataatatttttgtatttttggttgagtataggtttttttttttgtttattttttttttttgtatttttgtttttgttttaaataatttaaattatatttgttttagtatacggattttttagtttatttggtaggttttatattaagaaggtttattatatattttttttatcggggatattttggtgtttgttttttgtttaggtgaaaatattaatggattttttttttatttttgaaagtgttttagtttggaagataaattttttggtttttttatttagagatgatgttggatagttaagtatgatgaggttttattttatttttgaaggatgttttttatttttttttgattttaggtggtttttatagaatagatttatataattttaaataaatatatattttaggattaatgtggtagatattttttaaagttttttataaaggaagtttcgagaattt

SEQ ID NO: 91 - DNA, 1250 bp, Artificial Sequence
  chemically treated genomic DNA (Homo sapiens)
tttttttcggacgtataggtatttttcgcgtttttttagttttcgtcgttttcgttatcgttttcgggtcgtcgcgtttcggtatatataggatttttgttgggtattaatagttttattatggggttggtttggggattaggcgttttgtttttgatgtatgtgtgtggtattaatcgtattttagagtttggcggagataatagcgtgtttgatatttttgaatttatcggggtcgttcgtaaggggtttgggcgtcgattggtgaagggtttcgatttttttagtttagtttttcgtatcgaggatgttaatttgattttttttgtgtttgatgataagttttaagatttggtggatgttgtgcgggtagaaaagggttttttttttttggtatttttgaggtagatgaagaagattcggggtacgttgttggttttggagcggaaagattattttggttaggtttttagcgtggtgtttaatggtaaggcgggtattttggattttagtttgatcgtttaaggaaagtagtacgtggtgtttgtggaagaagtttttttggtaatcggttagtggaagagtattattttgtttgtgtaggaagatagggtttagttgtatatcgattgtgaaaagatggagaatgttgagttggacgtttttatttaaagcgtttttattagagatttggttagtatcgttagatttcgtatcgtaaaggggggcgttaatgataatttttagggggtgttgtagaatgtgaggtttgtttttggaattatattagaagatatttttaggaataaaggttgttttagttttattagtgttttttttatttttgataataacgtggtgaatggttttagttttgttattcgtattaattatattggttataagataaaggatttgtaagttatttgcggtattttttgtgatgagttgtttagtatggttttggaatttaggggtttgcgtattattgtgattacgttgtaggatagtattcgtaaagtgattgaagagaataaagagttggttaatgagttgaggcggttttttttatgttattataacggagtttagtatagaaataacgaggaatggattgttgatagttgtattgagtgttattgttagaatttagttattatttgtaaaaaggtgttttgttttattatgttttgttttaatgttatagtttttgatggagaatgttgttttcgttgttggtttagatgtga

SEQ ID NO: 92 - DNA, 1250 bp, Artificial Sequence
  chemically treated genomic DNA (Homo sapiens)
ttatatttaggttaatagcgaggatagtattttttattaggaattgtggtattggagtagggtatgatggggtaggatatttttttgtagatggtaattgagttttgatagtgatatttagtgtagttattaatagtttatttttcgttatttttgtattgaatttcgttgtgatagtataggggaggtcgttttagtttattggttaattttttgttttttttagttattttgcggatgttgttttgtagcgtggttataatggtgcgtaggtttttgagttttaggattatgttggatagtttattataggagatgtcgtagatggtttgtaagttttttgttttgtggttaatgtagttagtgcggatggtagggttggaattatttattacgttgttgttaagggtgaggaggatattggtagagttggagtagtttttgtttttgaggatgttttttggtgtggttttaaagataaattttatattttgtagtattttttggaaattgttattgacgtttttttttgcgatgcggagtttggcgatgttggttaggtttttggtgaagacgttttggatggggacgtttaatttagtattttttatttttttatagtcgatgtatagttgggttttgtttttttgtataaatagggtgatgtttttttattggtcggttgttaggagagttttttttatagatattacgtgttgttttttttggacggttaggttgaggtttagggtgttcgttttgttattggatattacgttgaagatttggttagagtggttttttcgttttagggttagtagcgtgtttcgggttttttttatttgttttagggatgttagaaggaggaaatttttttttgttcgtatagtatttattaggttttggaatttgttattaggtataggggggattaggttggtattttcgatgcggaaagttgggttggaagggtcggggttttttattagtcggcgtttagattttttgcgggcggtttcggtgagtttaaagatgttaaatacgttgttgttttcgttagattttggaatgcggttggtgttatatatatgtattaggaataggacgtttagtttttaggttagttttatggtggagttgttggtgtttagtagggattttgtgtgtatcggagcgcggcggttcgggagcggtggcgagggcggcgagggttggaggggcgcggggaatgtttgtgcgttcgggggggg

SEQ ID NO: 93 - DNA, 3107 bp, Artificial Sequence
  chemically treated genomic DNA (Homo sapiens)
ttgtagtgaacggtgattatattattgtatattagtttggggatatagttagattttgttataaaaaagtaaaaataattggttagtgtatgaggggttcgtgttttttgtttgtttgtttgttgagatagagttttattttgtcgttagattggaatgtagtggtatattttcggtttattgtaatttttgttttttaggtttaagtaattatttgttttagttttttaagtagttgggattataggcgttcgtattacgttcggttaatttttttgtatttttagtagagacggggttttattattttggttaggttggttttgaatttttgattttatgatttattcgtttcggttttttaaagtgttgggattataggcgtgagtttttcgttcggttaggggcgcgcgtttttaaaatatgggagagggaattgtgttttataattattattaggtgtttcgatatcgggtgttacgtcgtttcgtttttgaggcgcggcggtttattttggtaggtcgaggcgggtggattatttgaggttaggagttcgagattagtttgataaatatggtgaaatttcgtttttattaaaaatataaaaaattagtcggacgtggtggcgtatgtttgtaattttagttatttgggaggttgaggtaggagaatcgtttgaattcgggaggcggaggttgcgatgagtcgagatcgcgttattgtattttagtttgggaaataagagcgaaattcgttttaagaaaaaaaaggaaagattttttttttttttttcgtcggaaatatttttttttaggacggcgcgtttgtgcggcgacgcgcgtttagttatttagtaatttcggcgttaagttattttaggtggagtttagtaataatagagttatcgcgttttttattaattagcgtcgatttcgttttcgtaggtttaattaattagtgtcggcgttgtaaggaagtttttagagttttcgaggaaggtttttttaatttaaatttattcgtttgataatttttttatatttttttaaagaaggaagagaagcgtatagaggagaagggaaataattttttaggagttttttttacggttatgaggaatttggggtttagttgaaaagtttaaattgtttttcgggaggttgggcgcggcgaattatttttagcggcgtacggagacggcgtttacgtgaggggtgataagtgacgtaatattcgttgtataaatttgttttcgttagttcggagtatttaggggcggttggttttgttgggtgagtttgtttgtgtttttgtgggtggacgtggttggtgattggtaggattttggtattcgttaataggtattggttcgtagtcgtaacgattttgggggggtgtgagaggggggaatgggtgaggttaaggtggaggttttttggggttgggtgggtcgttgaggggagggcgtgggggaggggagggcgaggtgacgcggcgttgggttttttcgggatagtgggttttgttgatttgaggggggcgagggcggttggcgcgcgcgggttgacggaaattaacggacgtttaatcgatcggcgattttgtcgagtttatttcgcggggaaggcggaaaagaggtagtttgtgtggtttttggaagtttttattttggaattttagtgtgagaaaggtgtttttttttgtgttttaatgggatttttatttcgcgagttttgtgggtttggttttgtttttagtttgtttaatatcgtgtttaggtttgaggtagattggagttcggtcgggggagtttgaatattcggaatagttagtggggaaagttgtggacgtttggtaagagagcgttttggatttttcgttgttgacgttgaaattttgaatgacgaatttcgtattaagtgatttagttttgtaaaattgaggggaggtttgcggaatattaacgtatttaaggtattttgaaggaatagttgttaattttgaagaatattaggtgtaaaagtaagaaatataatgattttgaggtgatacgtttatgttttatttttaaattaggttaaaatgtagattttcgtgaaaatttttatcggtaagattattatttttgaggtggagtttagtgatattatcgaaaatgtgaaggttaagatttaggataaggaaggtatttttttcgattagtagaggtttatttttgtaggtaagtagttggaagatggtcgtattttttttgattataatatttagaaggagtcgattttgtatttggttttgcgtttgagaggtggtatgtagattttcgtgaagattttgatcggtaagattattattttggaagtggagtttagtgatattatcgaaaatgtgaaggttaagatttaggataaagaaggtatttttttcgattagtagaggtttatttttgtaggtaagtagttggaagatggtcgtattttttttgattataatatttagaaggagtcgattttgtatttggttttgcgtttgagaggtggtatgtagattttcgtgaagattttgatcggtaagattattattttggaagtggagtttagtgatattatcgaaaatgtgaaggttaagatttaagataaagaaggtatttttttcgattagtagaggtttatttttgtaggtaagtagttggaagatggtcgtattttttttgattataatatttagaaggagtcgattttgtatttggttttgcgtttgaggggtggttgttaattttttagttatggtattcgtagtgtttagtgatggtattattttgtattatagttatttgttttaatttaagtttagaaattataagttttagtaatagttgaatttgtttaaaatgttaataaaggtttcgttgtatggtagtatatttggtgttttgttatgaaattttttagtgatgtgtgggtacgtttaaaattggtgaaaatgtttagggatttaattttgagattggtaatgtgtttaaagttaagttatttgattttggtatatatttgggtgggttgaggggtaagagttttttttgttgtttaagttattataagttaggattt

SEQ ID NO: 94 - DNA, 3107 bp, Artificial Sequence
  chemically treated genomic DNA (Homo sapiens)
ggattttaatttgtaatgatttaaatagtaaagaaggtttttgttttttagtttatttaagtgtatattaaagttaagtgatttaattttgagtatattattaattttaaaattaaatttttaaatatttttattagttttaagcgtatttatatattattagagaattttatgataaaatattaagtatgttattatgtaacgaaatttttattaatattttgaataggtttagttattattgaaatttgtaatttttaaatttaagttggggtaaatggttatagtgtagagtaatgttattattgggtattgcgaatgttatgattgaagaattaatagttattttttaggcgtaggattaggtgtagggtcgattttttttggatgttgtagttagaaagagtgcggttattttttagttgtttgtttgtaaagatgagtttttgttggtcgggagggatgttttttttattttggattttggtttttatattttcgatggtgttattgggttttatttttagagtgatggttttgtcggttagggtttttacgaagatttgtatattattttttagacgtaggattaggtgtagggtcgattttttttggatgttgtagttagaaagagtgcggttattttttagttgtttgtttgtaaagatgagtttttgttggtcgggagggatgttttttttattttggattttggtttttatattttcgatggtgttattgggttttatttttagggtgatggttttgtcggttagggtttttacgaagatttgtatattattttttagacgtaggattaggtgtagggtcgattttttttggatgttgtagttagaaagagtacggttattttttagttgtttgtttgtaaagatgagtttttgttggtcggggggaatgttttttttattttggattttggtttttatattttcgatggtgttattgggttttattttaagggtgatggttttgtcggtaagggtttttacgaagatttgtattttgatttagtttaaaagtaaaatataagcgtgttattttaggattattgtattttttgtttttatatttaatattttttaaaattagtaattatttttttaaaatgttttaaatacgttaatatttcgtaagtttttttttaattttataaggttaagttatttaatacgaaattcgttatttaaggttttaacgttaatagcggaaaatttagagcgtttttttattaagcgtttatagttttttttattaattgtttcggatatttaaattttttcgatcgaattttaatttgttttaaatttaagtacggtgttaggtaaattgaaaataaaattaaatttataagattcgcgaaataaaaattttattgaaatataagaaggggtattttttttatattgggattttaaagtaaaggtttttagaaattatataaattatttttttttcgtttttttcgcgaagtaaattcgatagaatcgtcgatcggttaggcgttcgttagttttcgttaattcgcgcgcgttaatcgttttcgttttttttaggttaataaggtttattgtttcggaaaggtttagcgtcgcgttatttcgttttttttttttttacgttttttttttagcggtttatttaattttaagaagtttttattttgattttatttattttttttttttatatttttttaaggtcgttacggttgcgggttagtatttgttagcggatattaggattttgttaattattaattacgtttatttatagggatataaataagtttatttaataaagttaatcgtttttaaatgtttcgggttggcggaggtaaatttatgtaacgagtgttgcgttatttattattttttacgtagacgtcgttttcgtgcgtcgttgaaagtagttcgtcgcgtttaatttttcgagaggtagtttaggttttttaattgagttttaaattttttatagtcgtaagaaaggtttttaaaaaattatttttttttttttttatgcgttttttttttttttttaggaaaatataagaaaattattaggcggatgaatttgagttgaagaaatttttttcgaaagttttggaaatttttttgtagcgtcggtattgattggttaggtttgcgaaggcgaggtcggcgttgattggtgggggacgcggtggttttgttgttgttgggttttatttggggtggtttagcgtcgaggttgttaagtaattgagcgcgcgtcgtcgtataggcgcgtcgttttgaaagagggtattttcggcgggagaaggagggggggttttttttttttttttttgagacggatttcgtttttgttttttaggttggagtgtaatggcgcgatttcggtttatcgtaattttcgtttttcgggtttaagcgatttttttgttttagttttttaagtagttgggattataggtatgcgttattacgttcggttaattttttgtatttttagtagagacggggttttattatgtttgttaggttggtttcgaatttttgattttaggtaatttattcgtttcggtttgttaaagtgggtcgtcgcgttttagaagcgggacggcgtggtattcgatatcgagatatttgatggtgattgtgaagtataatttttttttttatgttttaaaaacgcgcgtttttggtcgggcgggaggtttacgtttgtaattttagtattttgggaggtcgaggcgggtggattatgaggttaggggtttaagattagtttggttaaggtggtgaaatttcgtttttattaaaaatataaaaaaattagtcgggcgtggtgcgggcgtttgtaattttagttatttgggaggttgaggtagataattgtttgaatttaggaggtagagattgtagtgggtcgagaatgtgttattgtattttagtttggcgatagagtgagattttgttttaataaatagataaataaaaaatacgagttttttatatattggttagttgtttttgtttttttgtgataaagtttggttgtgtttttaggttggtgtgtagtggtgtgattatcgtttattgtag

SEQ ID NO: 95 - DNA, 4001 bp, Artificial Sequence
  chemically treated genomic DNA (Homo sapiens)
tatggaaagtgtaaatagtgttcggtgtaaagtaggagttgtgataagtggatttttttttagaaatgggatttcgggttaggagtagtggtttacgtttgtaattttattattttgggaggttaaggtgggtggatcgtttgaggttaggagttcgagattagtttggttaatatggtgaaattttgtttttattaaaaatataaaaattaggtacgtgtgatggtgtatgtttgtaattttagttattcgggaggttgaggtaggagaatcgtttgaattcgggaggtgaaggttgtagtgagttgaaattttgttattgtatcgtagtttgggcgataagagtaaaattttatttgaaaaaaaaaaaaaggaaagaaagaaggaaagagaaggaaagaaagaaggaaagagaaaggaaggaaagaaagaaagaggaaaaaaggaaaggaaaaggaaaaagaaaagaaagaaaaggaaggaaagggagaaatgggatgtttgttaggtgtagcgttttggggaggcgtggagagtttataatagggattaaggtgttttttagtcgtagaatatggattatttgttaggtgtggttttggtatatttaggttattggttttgtcgatttgttaaatttaattatttgggtattttttcggttaatatagaggatgtttttatgtgaatacgtgtttatttgtgaaatgtttataatgttaaaggttcgttttggggtaaatatttgatagcgtttggtaaatttaataaatgttttttttgtaatgagtaagttttttaatgtttaaagaaatagttgaattcgttagtaatatgtcggatgttttttttatgtttgtatattttttcgttagtttttttttttttttttttttgagacggagtttcgtttttgttgtttaggttagagtgtaatggtgttatttcgttttatcgtaatttttatttttcgggtttaagcgagttttttgttttaacgttttgagtagttgggattataggtatgtgttattacgtttggttaattttgtatttttagtagagacggggtttttttatgttggttaggttggtttcgaattttcgattttaggtgattcgttcgtttcggttttttaaagtgttgggattatcggcgtgagttatcgcgttcggttcgttagttttaatatttatgttttttggagggtgaagggtttgaaaggtattaaaaattttggtttttaggagcgagttaaatttttttttttagagattgaaggaggttattcgatttcgtttttaggaaaatttaattcgtaatttttttttcgttttggtttttttaggttttattattcgcgtcggggagacgcggttcggtttacgttaggtcggtaagaatttattaggttttaggagggcggggtcgagttttagaagtcggggttcgggttaggagttttggtgtaggcggattcgggcgcgtgttatgggattataattttcggtacgtatcgcggattgcgtcgaatacggttggttgggagatttaattttattgtttttatcggttaatgggacggaggaaagaggtttgattcggattttcggaggttaatggtaatatagaggaggcgggtgtttttttattatttattttgcgtttagagaagttatatttaaaaggtcgtgtcgggtcgggttttcgtaggtagtgggattagagtcgggaggggcggcggtgtttcgggaaagcggtttttggggtattcgggttttttcgaggcgggtttcggacgtcgtcgtgggcggggtcgagggcggggtttggtttcgttgtggagcggttcgtaatttattatggcggtcgcggggtttggtgtttgtgtttgagtagcgttggagtcggagtcggttttcgggttttgcggttgaggagttttttcgttgtttacggtttttatcggcggggggcggttgggtttttcggcggagttcgggagatgtgattgtttgagggcggtggtggtgttagcgttcggggtcgggggagggggtgtttcgggtagagattttcgggtttggggtagttgaggcggtcgggttttttttatacggggttcgtttttcgttgtttgggtcgcgagagtttttcgttttttatagtttcgtttcggttttgggatattgcgggtggtttgttttttttagtttgggatatttcgttttttgaggcgtggaagagcgtcgtttcggagtaagttgttcgtgtcgcgtttcgatagttttttttagttttaagtcgttttttatttcggatttcggttttaattttggttacggagttttttatttaaattttttttttgttgttaaggggttttttttttttttaaggtggttttcgcgagtttttaatgttttgattttttttaatgttatttacggtttttttagttttagtttagttaaaaattttaatgtaaaggaaaagtttggattggttttataggttttttaaaaagcggatttaaaagttgttggtaatgtattttttttcgttagagtcgagggtaaattcgttgaaatttgggtgattcgtgttttttttcggagagtaaagtagagaagcgagagcggttattagttcggtaggaaatttgttggaagatgaagaagttaagatagggggttggtgatttttataggaaaagttttggaggagtagttaaagattattagcgttttttttatgtgtgagaattgaaatgattagtattattgattttttttagtattttttgtgaatatttttgtttaggtttttttttttgaaaagaaattgttatttagttcgtttaaaataaattaagaaatttttgggtaatattgtaattatatgaaattgataatcgcgaaaataattggaatttttgtttgtaagtgttaatttaaaaaaagtgtttttttttgttatggaagatgtttttttgtgattgattttaattgttgatttgtggagatgtagcgaatgtgaaattttacgtatatgttatttttttttacgttcgttgatcgttttggaagattttgaatttttttttggaaaggggtatttattattattttatggggtagtagtttggaaaagtatttggggattaaagaaggttaagtttgtttgttttgtattttattaaaggagtagggaagaaggaattatcgaggtatgggggtttatattgtaatgtttttgtggaatatggtgagtgttttttaaaatttttgtttatggttttttttatgtatttattttaggtttttaaggaattttgaataatagtatttgcgatagttttttttaattttatttaataaatttgttattgtagttattttttagtggaattttttttgtataagaaaaagttatttcgtgatttcggttttatttaaaatttatttgagttgtttattttttgtttgatttttttgttaatttattgttgattttggataagttattttattgttttagggttttagttttttgaggggttggattttagtggttttttagggtttttggttttatgattttgttttaatcgaagtcgtgggtttttttgataagtatggattttttattgttttgtttatagagagtttttattatatttttaaagtggtttgtgtttttgagaaagttaagaattatagatattggttgacgttaatatttttgattttttttttcgtaagtaggatttgaaaatatttattttggagttatgtgggaaaaattaagtggggaagtagtattttttgtgaattttagatagatagtttttgttttattttttataaggagtaatttttttttcgttgatgaagtttttattttgttttttttttgtttagaatgatatttgggttaataaaggttatttgtgatatttttatgaatatatttggtatttgaatgttgttcgtatatt

SEQ ID NO: 96 - DNA, 4001 bp, Artificial Sequence
  chemically treated genomic DNA (Homo sapiens)
aatgtacgggtagtatttaaatgttaaatatgtttataaaaatgttatagataatttttattggtttaaatattattttaaatagggagaagataggatgaaagttttattaacgaggaagagattattttttatggaaggtaagatagaagttgtttatttaaaatttataaggaatgttgtttttttatttgattttttttatatggttttaaagtgagtatttttaagttttatttacgaaggaaaaggttaaggatattagcgttaattagtatttatgatttttaatttttttaggaatataaattattttgagaatatgataaaagttttttgtagataaagtagtaaagaatttatgtttgttagaagagtttacgatttcggttagagtagaattatagaattagggattttaagaaattattgaagtttagttttttaggaaattaaagttttggaatagtaaagtggtttgtttaaggttaatagtgaattagtagaggaattaggtaagaaataagtaatttaaatagattttgaataaagtcgaagttacgaagtaatttttttttatataaagaaagttttattaagagataattatagtaataaatttattaagtggaattggaaggaattgtcgtaagtattgttgtttaaagttttttgaaggtttaagatgaatgtatgaggaaaattatgagtagaaattttgaaaagtatttattatgttttataaaaatattgtagtgtggatttttatgtttcgatgatttttttttttttgtttttttgataaaatgtagggtaggtaagtttggttttttttggtttttaagtatttttttaggttgttgttttataaagtaataataggtatttttttttagaagagggtttaagattttttagaacggttagcgagcgtagagggaaatggtatatacgtgggattttatattcgttgtatttttataagttagtaattgaagttaattatagaaagatattttttataataaaaggaagtattttttttaggttgatatttgtaagtaggagttttaattattttcgcggttattaattttatgtaattgtaatgttatttaaaagttttttgatttgttttaaacgggttgaataataatttttttttaagaagaaaaatttaaatagaaatatttataggggatgttgaaaagggttaataatgttagttattttaatttttatatataaaggaaacgttgatggtttttggttatttttttagaattttttttgtggaagttattaattttttattttagtttttttattttttaataaattttttgtcgaattagtggtcgttttcgtttttttgttttgtttttcggaaaaggatacgggttatttagattttagcgagtttgttttcgattttgacgaaaaggaatgtattgttagtaatttttaagttcgttttttaaaaggtttgtggaattaatttagattttttttttgtattaaagtttttggttgagttgagattaagggggtcgtaggtgatattggaagaagttagggtattagaggttcgcgggagttattttgggggaaggggagattttttgatagtaagggagggatttgaatgggaggtttcgtggttaaagttggggtcgggattcggaataaggggcggtttggggttgagggaagttgtcggggcgcggtacgggtagtttatttcggggcgacgtttttttacgttttagaaaacggggtgttttaagttgggggaaatagattattcgtagtgttttaaagtcggggcggggttgtaagggacgaaggattttcgcggtttagatagcggaaggcgggtttcgtgtagaggaggttcggtcgttttagttgttttaagttcgggggtttttgttcgagatattttttttttcggtttcggacgttgatattattatcgtttttaggtagttatatttttcgagtttcgtcgagggatttagtcgtttttcgtcggtaggggtcgtggatagcggaggggttttttagtcgtaggattcgggaatcggtttcggttttagcgttgtttaggtatagatattaaatttcgcggtcgttatgatggattacgagtcgttttataacgaggttaggtttcgttttcggtttcgtttacggcgacgttcggagttcgtttcgaggggattcggatgttttaagagtcgttttttcgggatatcgtcgtttttttcggttttggttttattgtttgcgaaagttcggttcggtacgattttttaaatgtggtttttttgagcgtaaggtgagtggtaaggaagtattcgttttttttgtattgttattggttttcgagaattcgggttaggtttttttttttcgttttattggtcggtgggagtagtagggttggattttttagttaatcgtgttcggcgtagttcgcggtgcgtgtcgggagttgtggttttatggtacgcgttcgagttcgtttgtattaagatttttggttcgggtttcgatttttggggttcggtttcgtttttttgggatttggtagatttttgtcggtttagcgtaggtcggatcgcgttttttcggcgcgagtagtgagatttggaagagttaaagcgagggaaaaattgcggattggatttttttggaagcggagtcggataattttttttagtttttaagggagaaaatttggttcgtttttagaaattaaggtttttgatgttttttaagttttttattttttaaaaagtataaatattagaattagcgggtcgggcgcggtggtttacgtcggtaattttagtattttgggaggtcgagacgggcggattatttgaggtcgggagttcgagattagtttgattaatatggagaaatttcgtttttattaaaaatataaaattagttaagcgtggtggtatatgtttgtaattttagttatttaggacgttgaggtaggagattcgtttgaattcgggaggtagaggttgcggtgaggcgagatggtattattgtattttagtttgggtaataagagcgaaatttcgttttaaaaagaaaaaaaaaaaaaaattagcgaagaaatatatagatatagggaaaatattcgatatgttgttaacgaatttaattgtttttttgggtattaggaggtttatttattatagaaaaggtatttgttgggtttgttaggcgttattagatgtttgttttagaacgaatttttaatattataaatattttataggtggatacgtgtttatatgaaaatattttttatattagtcgagaaaatgtttagatggttgggtttagtaagtcggtagaattaatgatttagatgtgttaaagttatatttaataaataatttatgttttgcgattaaaaagtattttggtttttattataggttttttacgtttttttagagcgttgtatttgataggtattttatttttttttttttttttttttttttttttttttttttttttttttttttttttttttttttttttttttttttttttttttttttttttttttttttttttttttttttttttttttttttttttttttttttttagatggagttttgtttttgtcgtttaggttgcgatgtagtaataggattttagtttattgtaatttttatttttcggatttaagcgatttttttgttttagtttttcgagtagttgggattataggtatatattattatacgtgtttaatttttgtatttttagtagagatagggttttattatgttggttaggttggtttcgaatttttgattttaagcgatttatttattttggttttttaaagtggtgggattataggcgtgagttattgtttttggttcgagattttatttttaaggagggatttatttattatagtttttattttatatcgagtattgtttatattttttata

SEQ ID NO: 97 - DNA, 4501 bp, Artificial Sequence
  chemically treated genomic DNA (Homo sapiens)
ttagggagtaaataaattatgtgtggggttgggtaattagttgagtcgaagcgtaaataaaatgtgaatatacgtttgcgggttatatatagtgtatttttattagtatttagaaaaaattgtgagttagtgaattaggaaattaatgtttggaaggtagttaaattttaattagtttaagatttttttttttttttaaaaaaaggtacggaagtaatatttttttttttttttttgattagaatcgatgtattttttgtgtatgatcgtatttttaataataaaaggggaaagaggatttggaaaggaattaaacgttcggtttgttcggggaggaaagagttaacggttttttttataagggtttttgttgattttttcggttcggtttataagttttttatttgttttttttaggaagttcggtttcgcggttcgggtattttttgttttttttatattttttcgtttagtatttttgattttttttaaattcggtagttcgagattgttgtaaatcggcgttatagggcgtaaaggggatttgttttttttgaaatttggttgagaaattgggaatttcgtgtgggaggcgtgggggtgggacggtggggtatagattggtagagagtaggtaatttttttttcgttttagtttagttttggaataggtagatatattttagggttaaatagacgtttttcgtacggggttttacggaagtttgagtaggcggggtaggaggggcggtatttgttgttttggtagtaaattgggggatttagtttgggtggaaggtatttaatttagatagttgtgtatatataatgtataatatatgattttttttaataaatgtaatgggagtttatttataacgcgttttttaagtatacgtggtaatgcgttgttgggttattttaattattttaggtatcgtttttttttttatgtttttattatttttttttatttatattaatattttacgttttgaacgcgcgtttattaatattttttttttttttattttttttgggatttttgattaaagcgcggttttttttttagttttagcgaggcgttttgtagtttggtacgcgcgtggcgtggcggtgggcgcgtagtgcgttttttgtgtggagggtagttgtttcgtttgcgatgatttatatttataggataaggatgcggtttgttaaatagtattgttacggaggagtagtagagaaagggagagggtttgagagggagtaaaagaaaatggtaggcgcgcgtagttaatttatgcggtttttttattttgtttatattttagagttagagtgttcggttgttcggttgagttttttttttattttttttattttttttattttttttataagcgtttttttcgggtttttaaagtagagggcgtgggggaaaagaaaaaagattttttttcgttaattttcgtttatcggttttttataatgcgagggtttggacggttgaggattttcgagttgtgttgttcgcggtcgttatcgtcgggtttcggtcgtttttggttttttttttgtttcgagaagggtagggttttttagaggtttggcgggaaaaagaacggagggagggatcgcgttgagtataaaagtcggttttcggggttttatttaattcgttgtagtaattttagcgagaggtagagggagcgagcgggcggtcggttagggtggaagagtcgggcgagtagagttgcgttgcgggcgttttgggaagggagattcggagcgaatagggggtttcgtttttggtttagttttttcgttgattttttagttagcggttcgtaatttttgtcgtatttacgaaattttgtttatagtagcgggcgggtattttgtattggaatttataatattcgagtaaggacgcgattttttcgacgcggggaggttattttgtttatttggggatattttttcgtcgttgttaggattcgtttttttgaaaggttttttttgtagttgtttagacgttggatttttttcgggtagtggaaaattaggtaagtatcgaagtttatttgttttttaatttatttttttattattttaatgttgagatgagtcgaatgtttaaatagggtgtttttttttttatttttgcgttattgatattttttttagagtagttatggtaattggggttggggtggggggtaatttagaattggatcggggtaaagtgatttgttaagatgggagaggagaaggtagagggaaaacgggaatggtttttaagattattttttcgagatttttgttttatgaatatatttacgttgattttcggtcggtcggatatttttgttttattgtgttaattgttttttgggttttggggggttgggggttgttttgcggtgggtagaaagttttttgtattttgagttttttggagtagggatcgtatatcgtttgtgtgagttagatcgtttcgtagtcgttgatttgttttcgttttcgggagggtatttaaatttcggtttatcgtatttttgatagtcggagacggatattgcggcgcgtttcgttcgtttgttttcgcggcgattttaattcgttttgatttttttaagaagttggtatttggttttttaaaaagtaataatataatttaaaatttgggtttttagaggtgttaggacgtggtgttgggtaggcgtaggtaggggaaaagggaggcgaggatgtgttcgatttttttggaatcgttgatttggaaaaattagggcgaattttcgtatttagttttgatttttttgtcgcggtcgttttcgggtgttttcgcgttcgagatgcggaggaattgcgaggagcggggttttgggcggttttagaatagttgttatttttggtggggtggtttcgggggaggtatcgtagcggggtttttggcgtagttgtattttcgtattgagtgcgaagggaggtgtttttattattatttgatattttttttgtatttatggaggggtgttaaagttcgcggttgagttcgttattttagtcggcgagagaaagaagaaaagttggtaaaaggagtgttggacgggggcggtattgggggtggggacgggggcggtggagagggaaggttgggaggggttgcggtgtcggcgggggtaggagagcggttagggcgcgagtgggaatagtcgtagcggaggggtttcggcgcggagcggggtttacgtagtcgttagcgtttaggcgtttttcgtttttttttttaggtggcgtaaaattttgtgttttggattttggtaaattgttttttttatcgttatttttcgcggttttttaagggcgttagggtcgatttcgatttttttgtcgttgcggggtcgattttcgggttttgcgtttcgggttttcgggggagcgggggttcggcgggtattaagtcgttggtttattaagtgcgttttcgagatagtaggggattgtttaaagggggtgaaagggtgttttttttatttttttattaagattatttagtcgttttaggggatagttttgtaaggggagaggttcgggattgtggcgcgtattgcgcgttgcgttaggttttcgtattaagatttttttaatttaagattgtttttcgttttgtgtgtttcgttttagtagtttttcgcgacgatgttttttaacgttagttttattaataggaattatgatttcgattacgattcggtgtagtcgtatttttattgcgacgaggaggagaatttttattagtagtagtagtagagcgagttgtagttttcggcgtttagcgaggatatttggaagaaattcgagttgttgtttatttcgtttttgttttttagtcgtcgtttcgggttttgttcgtttttttacgttgcggttatattttttttttttcggggagataacgacggcggtggcgggagtttttttacggtcgattagttggagatggtgatcgagttgttgggaggagatatggtgaattagagttttatttgcgattcggacgacgagatttttattaaaaatattattatttaggattgtatgtggagcggtttttcggtcgtcgttaagttcgttttagagaagttggttttttattaggttgcgcgtaaagatagcggtagttcgaatttcgttcgcggttatagcgtttgttttatttttagtttgtatttgtaggatttgagcgtcgtcgttttagagtgtatcgatttttcggtggtttttttttatttttttaacgatagtagttcgtttaagttttgcgtttcgtaagattttagcgtttttttttcgttttcggattttttgtttttttcgacggagtttttttcgtagggtagtttcgagtttttggtgttttatgaggagatatcgtttattattagtagcgattttggtaagcgaagttcgtttaggtttgttaaaagtgggcggttggatatttttt

SEQ ID NO: 98 - DNA, 4501 bp, Artificial Sequence
  chemically treated genomic DNA (Homo sapiens)
gaaaggtatttagtcgtttatttttgataggtttgggcgggtttcgtttattagagtcgttgttggtggtgggcggtgtttttttatggagtattaggggttcggggttgttttgcggggaggatttcgtcgaggagagtagagaattcgaggacggagagaaggcgttggagttttgcgaggcgtaggatttgggcgagttgttgtcgttgagagggtaggggaagattatcgaggggtcgatgtattttgaggcggcggcgtttagattttgtaggtataagttggaggtggagtagacgttgtggtcgcgggcggggttcgggttgtcgttgtttttgcgcgtagtttggtaggaggttagtttttttgagacgagtttggcggcggtcgagaagtcgttttatatatagttttggatgatgatgtttttgatgaaggtttcgtcgttcgggtcgtagatgaaattttggtttattatgtttttttttagtagttcggttattatttttagttggtcggtcgtggagaagttttcgttatcgtcgtcgttgttttttcgaagggagaagggtgtgatcgtaacgtaggagggcgagtagagttcggagcggcggttaggggataggggcggggtgggtagtagttcgaattttttttagatattttcgttgggcgtcgggggttgtagttcgttttgttgttgttgttggtagaagttttttttttcgtcgtagtagaaatacggttgtatcgagtcgtagtcgaggttatagtttttgttggtgaagttaacgttgaggggtatcgtcgcgggaggttgttggagcggggtatataaagcgggaggtagttttgagttaaaggggttttggtgcggaaatttggcgtagcgcgtagtgcgcgttatagtttcgaatttttttttttgtagagttattttttaaagcggttgggtggttttggtgggggaataaagggagtatttttttattttttttggatagttttttgttatttcggagacgtatttagtgaattagcggtttggtgttcgtcgagttttcgttttttcgggagttcggagcgtaaagttcgggagtcggtttcgtagcggtagaggaatcgaaatcggttttggcgtttttaagaagtcgcgggaggtggcggtgaggaaaataatttgttaaaatttaaggtataaagttttgcgttatttgaaggagaaggcgagaggcgtttgggcgttagcggttgcgtgaatttcgtttcgcgtcggggttttttcgttgcggttgtttttattcgcgttttagtcgtttttttattttcgtcggtatcgtagttttttttaattttttttttttatcgttttcgtttttatttttagtatcgttttcgtttaatattttttttgttagttttttttttttttttcgtcggttggagtggcgagtttagtcgcgggttttaatatttttttataaatataaggggggtgttaaataataataggggtattttttttcgtatttaatacggagatgtaattgcgttagagatttcgttgcgatatttttttcggagttattttattaagggtagtagttgttttggaatcgtttagagtttcgtttttcgtagttttttcgtatttcgggcgcgaggatattcgagggcggtcgcggtaggggagttagggttgggtgcggagattcgttttggtttttttaagttaacgattttaggagaatcggatatattttcgtttttttttttttttgtttgcgtttatttaatattacgttttaatatttttagagatttaggttttaaattgtattattgttttttaaaaagttaaatgttaattttttaaaaggattagggcgggttggaatcgtcgcggggataggcgggcgggacgcgtcgtagtgttcgttttcggttgttagaaatgcggtgagtcgaaatttaaatgttttttcggagacggggataagttagcggttgcggagcgatttggtttatataggcgatatgcggtttttattttaaggagtttaggatgtaaggggttttttgtttatcgtaaagtaatttttagttttttaaaatttagagagtaattaatataataaagtaggaatgttcgatcggtcgggagttagcgtgaatatatttataaggtagaaatttcgaaagggtagttttaaaaattattttcgttttttttttgttttttttttttttattttgataagttattttatttcgatttagttttggattattttttattttagttttagttattataattattttgagaaaagtgttaatagcgtaggaatgggagaaaagatattttatttaggtattcgatttattttagtattaaagtgataaaaaaataaattaaaaggtaagtggatttcggtgtttatttggttttttattattcgaaaaaaatttagcgtttaagtagttgtaaggagagttttttagagaagcgggttttggtagcggcggggaagtgtttttaaatgggtagaatagttttttcgcgtcgggagagtcgcgtttttgttcgggtgttgtaagttttagtgtaaagtgttcgttcgttgttatgggtaaagtttcgtggatgcggtaagggttgcggatcgttggttgggggattagcgggagggttgggttagaggcgaagttttttattcgtttcggatttttttttttaggacgttcgtagcgtagttttgttcgttcggtttttttattttagtcggtcgttcgttcgttttttttgtttttcgttggaattattatagcgagttagataaagtttcgaaaatcggtttttatatttagcgcgattttttttttcgttttttttttcgttaagtttttgagaagttttgtttttttcgaggtaggaggggagttagggacggtcggggttcggcggtggcggtcgcgagtagtatagttcgggggtttttagtcgtttagattttcgtattataaagggtcggtgggcggagattagcgagagaggattttttttttttttttttacgttttttgttttgggaattcgggaggggcgtttatggggagggtggggagggtggggaaggtggggaggagatttagtcgggtagtcgagtattttagttttaggatgtaaatagagtaagagagtcgtatgaattaattacgcgcgtttattatttttttttgtttttttttaaattttttttttttttttgttgttttttcgtagtagtattgtttgataaatcgtatttttgttttgtgagtataaattatcgtaggcggaatagttgttttttatatagagaacgtattgcgcgtttatcgttacgttacgcgcgtattaggttgtagggcgtttcgttaaggttggggaaagggtcgcgttttgattaagagttttagggagagtggaggaaagaagggtattaatgggcgcgcgtttagagcgtgggatgttagtgtagatagggaggaatgatagaggtataaggaggaaaacgatgtttagaatgattaaaataatttagtaacgtattgttacgtatatttggagagcgcgttatgaataaatttttattgtatttgttggggggagttatgtattatgtattatgtatgtatagttatttggattggatattttttatttagattgagttttttaatttgttgttaaagtagtagatatcgttttttttgtttcgtttgtttaggttttcgtggggtttcgtgcgggaggcgtttgtttagttttgagatgtgtttgtttgttttagagttgggttagggcgagagggaggttgtttgttttttgttagtttgtattttatcgttttatttttacgttttttatacggagtttttaattttttagttaggttttagaagagataaattttttttgcgttttgtggcgtcggtttgtaatagtttcgggttgtcgggtttgggagaaattaaaggtgttagacgggagaatatgggaggggtagggggtattcgaatcgcgggatcggattttttaaaaggggtaagtggagagtttgtggatcgagtcgggggagttagtagagatttttgtgaaaaaaatcgttaattttttttttttcggataaatcggacgtttaatttttttttaggttttttttttttttttattattggaaatgcggttatgtataaaaaatgtatcgattttgattaaagaagaggagaggagtattattttcgtgtttttttttgggggggggggggagttttgagttaattaaaatttggttgttttttaggtattaattttttagtttattgatttataattttttttgaatattagtgaaagtgtattgtatgtaattcgtaaacgtgtatttatattttatttacgtttcgatttagttagttgtttagttttatatatgatttgtttgttttttga

SEQ ID NO: 99 - DNA, 4501 bp, Artificial Sequence
  chemically treated genomic DNA (Homo sapiens)
aagttgttttaggtgtagaaattataaagtaagtaggagtaggtttttgtttttaagatgttttatatgtagtatagatttaacgtatttaaaacggaaggttgttattttttttgtttttttaatttatataataatatatattcgtgttttatgttttaattatattgaattgtttgttttttttattttcgtttgttaatagtgagtagtttggtgtttttagattataggggtgggagggaaagagagagatagtagataattaggttggggtagatagatattagattttgatgttaggtggaggaatttagatgtattggttgttgttttaagttatttttttttggtttaaattttagattggtcgtatagtttaatttttttttttttattaaaggttatttgtgtagaagatgatataaagggggatttagtacggtgattcgtgtttgtaatttttgtattttcggaggttaaggagggaggattatttgagtttaggagttcgaggttgtagcgagttatgatcgagttattgtattttagttttgacgttgagtgagattttgttttttaataaaatatatttaaaatttaaaaagaagattatataaaggggttatttattattttggttagtaatgtagggtaaaatttgaaataatttggttttgtagtattttttagatgttaaatttttattttttattgtatagtttttatagtgttttgtgtgagatgagagggagtatggcgggttttagttggttttgttttgggaaaaattttttatttttgtatcgtttttttaaagcgggggttaagttagcgtcgtttgtttttttatttagattagattttttttttagatgtttttatttttttgaagttttataataattttgtgaggtaagtattattatttttttattttatagatgaaattgaagtttaggaaggttacgtttcgggttttaaatttcggaattttcgtttcgatgttatttaggtttgggttattgagtttaagaaacgggtcgacgggtgattagacggacgtcgggattagtttaagtttagggttgagggtcgttaggtggcgcgtttttttttttttatttttcgcggcggttcgggcgtatttgaatttagcggggtgcgtcggggaaagtaggcgcgtagggtggggcggggagtagttttaattttttagttcggagtgggtaaggagtacggtttagtttagtcggttggtatcgttaagcggtcgtcgggtcgtattagttttttttttgtttgcgttttttagcgtgtaatttatttggggggttatcggggattgaacggagcgggcgagcgttgttaggaggtggggtcggttttatttgtcgattgttcgtagtaggtagggagagggcggggtttgttttatagggttcgttttttagtttttgggtttcgggcgcgcgacgagatataaggtagttaggaaataatgcgtttgtagttcgcgttttcgcgtcgatttcgagagcgttcgggtcgtcgtgcgcgagcgagggagggcgcgcgcgcggggggggcgcgtttgtgagtgcgggtcgcgttttcggcggcgcgtatgtgcgtgtgtgttggttgtcgggttgtttcgagtcggcggggagtcggttcgttttaggtggcgggcggttggagcgaggtgaggttgcgggtggttagggtacgggcgcgggtttcgcggtgcgggttggttgtaggttgttttttgggtacggcgcgttttcgttcggtttcgtcgggttttgggagttgcgtttcgggcggcgttggtaaagtttgttttgaattcgttgtttatagtcgggttcgcgcgttgcgattggttttttttattattttgattcggggttcggtttttcgggacgcgaggattgggcgtaggttgtaagttggtggggttggggaggaacgagagttcggtagtcgattgtgtcgagggattcggggatatttttttcgttcggtcggtattcggttagtacgtttttttttttttttcgtagggagcggatatggattacgattcgtattagtattatttttacgattatgattgcggggaggatttttatcgttttacggcgtttagcgaggatatttggaagaaattcgagttggtgttatcgttttttacgtcgtcgttttggggtttgggtttcggcgtaggggattcggttttcgggattggtttttcggagtcgtggttcggagggtgtatcggagacgaagcggaatttcggggttattcgaaaggttggggtaggaattacgtttttattatacgtcgtgattgtatgtggagcggtttttcggttcgggaacggttggagagagttgtgagcgatcggttcgtttttggcgcgtttcgggggaattcgtttaaggcgttcgtcgtttcggattgtatttttagtttcgaagtcggtaattcggcgttcgtcgttttttgttcgttgggcgaatttaagatttaggtttgtttcgggttcgagagtttaagcgattcgggtaaggattttttcgagttatttaagagggggttattttatgggtggttaaagttttgtttttgtttgaggttaggtattggttttttttaagtttttgggttattttcgtttttttttggttgaagttgttcgtgtagtttttaatcgtgtttgtttggtacgtgggtgtgttggtaaatagtttggaaaagtggcgtgggagttagtttttttttgatgattattggagttttaggggataagggatttgaggtgagggttggcgtttagagaggataatattggggttggattgtaagggattgaagggggtattttaagagatattttaaatttgaagtttttttgttgttgtttttttttttaggaaatttatatttttttagggggagaagaagtcgagagttttttgtgtaaagttaaaattttcgtttttttaaaaatttaggtttttagttggttttattttaaaatgttaataataaatgtttttttttcgtgtttttttattattatttattattcgtgtatttttgagatagggagggaagaatgaatattttttattaatagatggaaaaattgaggtttagagatagataattattataagttagttttagttttttgttatttagttagttttttttttttaatgttttattttaattaggtattttttttttgatgtttggggtttttgtggtagtttattttagaagtattatattttgttttgttgtttgttttgagatggaaaagtgttttttttgtttttttttaatagatttttagcgttagttgttttttggtatttaataaatatttattggtttttattttgtggtaatttgtgggttatatgttggggttaaggtagtagaattttaggttttttttttttatttttgatgtaagtgtaatttcgttgagggtagattggggtattttgtgttattaaattatattgtttttattttggtattttagatttttatattcgtgagaaattttggagagggtatttttgtagagtgtagattgtggttagtgataaataaattaggattaagaaagtttattgtagtttttaggaataatttttatacgattatttgatagggaattggggaatggggtatggaagtttttttatatttgagagaaaaaataggataataaaaattaaaagtttttttttttttggtttattgtgttaaggttatttttaattagtttgttttttatattaagagtttatgtttgtttaatggttggaaagagaattttgagattaaaaaattaataaagatgtatttttataacggttggtggagtggtagagtggaaagagtattgttttggaagttggatattttagtttgagatttagaacgttataaaggtgatatgtggatttcgttgatttgggttttagtttttttatttgtatacgatggggttggatttgattgttttgttgatgatatttttttgtttggatagagtaagatattattttttgaaagggagaatggtgttttaaattattttttttttagatagaatttttttgagttacgaggtttaatattgaaaattaaaggtttgggatgtagggaagtttgttgaattattttttaatttattttttaatttgaatttgtttgtgagtttttagtttatttataggttatatggtttggaataaaatgtaatagattgtaaataatgaggcggggggtggggaaagtgattggtagtagagtttatttaataggggttaggggttgggtaagatagaagtttaaatatagcgtaattagttaattatgggttttggggttaggagggttgaatggttaggtttattaatggagaaataatgcgattgtttatataatggaagtttttttgataaa

SEQ ID NO: 100 - DNA, 4501 bp, Artificial Sequence
  chemically treated genomic DNA (Homo sapiens)
tttgttaggaaggtttttattgtgtggataatcgtattatttttttattaataaatttgattatttagtttttttggttttaaagtttatgattggttgattacgttgtgtttggatttttgttttatttagtttttagtttttattgggtgagttttgttgttaattattttttttatttttcgttttattgtttgtaatttgttgtattttgttttaggttatgtggtttgtgagtgaattagaagtttataaataggtttaggttaaagggtaggttagaaaatgatttagtaggtttttttatattttaaatttttaatttttagtgttaagtttcgtggtttaggaagattttatttaagaaagaaataatttaagatattatttttttttttagagagtagtgttttattttatttagataaggaaatgttattagtaggataattaagtttaattttatcgtgtgtaaatggggaaattgaggtttagattagcgaagtttatatattatttttgtaacgttttggattttaaattaaaatgtttaatttttaaagtaatgttttttttattttattattttattagtcgttgtagagatatatttttattggttttttgattttaagattttttttttagttattaaataaatataaatttttggtgtagaaagtaagttggttaaaaatgattttaatatagtggattaggaaaaaaaagatttttaatttttgttattttatttttttttttaagtgtaggaaaatttttatattttattttttagttttttattaaatggtcgtgtaaaagttatttttaaaagttatagtgagtttttttggttttaatttatttgttattagttatagtttatattttataaaaatattttttttaggattttttacgggtgtggaggtttaagatgttagaataagaataatgtagtttagtggtataggatgttttagtttgtttttagcgaggttgtatttgtattaaggatgggagaggagggtttggagttttattgttttgattttagtatgtagtttatagattgttataaagtaggggttagtgaatatttgttgaatgttagggagtagttgacgttggagatttattgagggggagtaagaaggatatttttttattttaggataaatagtaaggtaaggtgtagtgtttttaagataagttattataaagattttaaatattaaggaagaggtgtttggttgggatggagtattggggaagaggggttggttagatggtagaaagttggagttgatttgtagtgattgtttatttttaagttttagtttttttatttgttaatggggagtgtttatttttttttttttgttttagggatgtacgagtggtaagtggtggtggggaggtacgagaagagggtatttattattggtattttaaagtaaagttaattggagatttaggtttttaaaaggacgaaggttttggttttgtataaaaggttttcggttttttttttttttaggggagtgtgagttttttagggaaagaggtagtagtaaaaaaattttaggtttggagtgttttttaaggtattttttttaattttttatagtttaattttagtattgttttttttaagcgttaatttttattttaaattttttgttttttggggttttaataattattaaagggaggttggtttttacgttatttttttaaattgtttattaatatatttacgtgttagatagatacggttggggattatacgggtagttttagttaaagagaggcggagatggtttaagagtttgagaagagttaatgtttgattttaggtaggggtagagttttggttatttatggggtggtttttttttggatggttcggggaggtttttattcgagtcgtttgggttttcggattcggagtaggtttgggttttgggttcgtttagcggatagggggcggcgggcgtcgggttgtcggtttcgaggttgggagtgtagttcggggcggcggacgttttgggcgggttttttcggggcgcgttaggagcgagtcggtcgtttatagttttttttagtcgttttcgggtcgagaagtcgttttatatgtagttacggcgtatgatggaggcgtagtttttgttttagtttttcgagtggtttcgggatttcgtttcgttttcggtgtatttttcgggttacggtttcgggggattaatttcgggggtcgggttttttgcgtcgggatttaagttttagggcggcgacgtggggggcgatggtattagttcgaattttttttagatgttttcgttgggcgtcgtggagcggtagaaatttttttcgtagttatagtcgtagaaatagtgttggtacgagtcgtagtttatgttcgttttttgcgggagggaaggggggacgtgttgatcgggtgtcggtcgggcgaaggaggtgttttcgggtttttcggtatagtcggttgtcgggttttcgtttttttttaattttattagtttgtagtttgcgtttagttttcgcgtttcgggaagtcgggtttcgggttagagtggtaggggaagttaatcgtagcgcgcggattcgattgtgggtagcgagtttaaagtaaattttgttagcgtcgttcggagcgtagtttttagggttcggcggggtcgggcgggggcgcgtcgtgtttagaaggtagtttgtagttagttcgtatcgcgggattcgcgttcgtgttttggttattcgtagttttatttcgttttagtcgttcgttatttggagcggatcggtttttcgtcggttcggggtagttcggtagttagtatatacgtatatgcgcgtcgtcgagagcgcggttcgtatttataagcgcgtttttttcgcgcgcgcgttttttttcgttcgcgtacggcggttcggacgttttcgggatcggcgcgggagcgcgagttgtaggcgtattgttttttgattgttttatatttcgtcgcgcgttcgggatttagggattggggggcgggttttatgggataaatttcgttttttttttgtttattacgggtagtcgataggtggggtcggttttattttttggtagcgttcgttcgtttcgtttaattttcggtagttttttaaataaattgtacgttggggagcgtaaataggaggagggttgatgcggttcggcggtcgtttggcggtgttagtcggttgagttaaatcgtgttttttgtttatttcgagttggggaattagggttatttttcgttttattttgcgcgtttatttttttcggcgtatttcgttgggtttaggtgcgttcgagtcgtcgcgaggggtagggggagggaaacgcgttatttggcggtttttagttttgaatttgggttggtttcggcgttcgtttggttattcgtcggttcgttttttgagtttagtggtttaagtttggatggtatcgaagcgaagatttcgggatttagagttcgaaacgtaatttttttgagttttagttttatttgtaaaatgaagggatggtaatgtttattttatagggttgttgtgaggttttagggaaataagagtatttagggaaggggtttggtttaggtggagaggtagacggcgttggtttagttttcgttttggggaggcggtgtagaaatgaggaattttttttagggtaaagttagttgagattcgttatgtttttttttattttatataaaatattgtaggagttgtatagtagagaatgaggatttggtatttggaaaatattgtaggattaagttgttttaagttttgttttgtattgttggttaagatgatagataatttttttgtataattttttttttaaattttaaatatattttgttaagagatagggttttatttagcgttaaggttggagtgtagtggttcgattatgattcgttgtagtttcgaatttttgggtttaaatgattttttttttttagttttcgaaagtgtagggattataggtacgggttatcgtgttgggtttttttttgtgttattttttatatagatgatttttggtggaagagaaaaaattaaattatacggttagtttgagatttaggttagaggagagtaatttgggatagtagttaatatatttagatttttttatttggtattaaggtttggtgtttgtttattttagtttgattgtttgttgttttttttttttttttttatttttgtggtttaagaatattaaattatttattgttggtagacggaagtgagaagggtaagtaatttagtgtggttggagtatgggatacggatgtgtgttgttatatgggttgggaaggtagggaaaatgatagtttttcgttttagatacgttgggtttgtgttgtatgtgggatattttgaaggtagaaatttgtttttatttgttttgtgatttttgtatttagaatagttt

SEQ ID NO: 101 - DNA, 4501 bp, Artificial Sequence
  chemically treated genomic DNA (Homo sapiens)
atatatttgtaagaaaagttagattagagtgaagtaaagttaggatttgatggtggcgggaagggaaggggttaatgttgttgttggatagaggggtgttattttttttagaagaatagtatgtcgtggttattattataataatagttgatataattattatgggttggggatttataagagtttttataatttttaggtaggaggtattacgaattttattttataattgaggaaattgaggtataaagaaacgaagtagtgatagtagtttttttttttttttttaatagtttggaattaagttgtttgagtcgaggttgggttttaggaggtgtggatagtatttttatttcggtaaattagattcgtttgtttataattggggagaatggtggttttgaaaaggttaatttgggagttttggggacggttgtagggaacgtacgtttattttttttaggaagtagagttaggtcgttttttttttcgtagtggtgaggacgcgtggatagtttcgcgggggcggcgggagatttgcggagtggtcgtattttaggttcgcgttaaggtcgggtagtttcgttttttgtttagttttcgcgaggtgtcgttttcggtcgaagaaattatcgcggcgttattttcgtagttcgtatttatttatttatttatttttaaataaggggggcgtttttttttttttaatttgaaattggaaatatttagaggttttgtttttaagggggcgcgttttttttttgttattttgtattttcggattagttttttttcgtaattatataggagtaatttttttgtaaggttttgtttaacgttggtttcgcgtttagttgtataatacgtagttaaagcgggggttgggttagaagtatcggttttttttttttaatatatattttcggagtttttcgtaattttttttttttttaatgataagtaattgttaggttcgtagggtgggtgttgtattgtatcgtttcgcgcgtagttggtttttagagtgtagtcggtgtaagttcgggggtttaaaagggcgggaggagtatattttgggttttttagttttgtagttttttttttgtaaagaaaagtaagtggtttttggcgcgaaagttttggcgttttttttgatttttatggaaattaggagggcggggtaaagtcgtttttttttttttttttttttttttttgtttgcgttatagttttttttttttttcgtttttcgggtgtgttagattttttagttaataatatttttcgagttttaaagcgtaggttgtgatagttatttgtttggacgcgttgggtggatgcggggggtttttgggaattgtgttggagtcgagtaagcgttagttaggcgtaagcgcgtatagattgtagttattcgaggatattttcgttttttcggtttattcggagatattcgcgtagaatcgttttcggattttttgtagtcggcgggaggtaaggagtagggtttgtaaatcgttcggcgtttagggaagcgacgagcgtcggggtaaggtaagttttggacgggattgcgacgtgcgtatcgggcgttttaatatgttcgggggattgtttttgttttcgaaataaaattatttttgggtttttttagaaaagttagttttagtttcgaaggtattttggttagaggagattcgttttaatttttttgtagtttttatcggggggagtaatggtttttgcgaaaagaaattttttcggttttagaagatttgtttgtgtttgagttgtcggagagtcggtgcgtttttattttaggttggggtttttttttaaagggtgtttttggaggaagaagagggggggattaggtagggcgaggtcgtcgcggtcgtaatttgggttacggttgttttagtttggaggagaggcggttttttcggcgatttttttcgcgcgggcgtttttgttattttcgggaataggggtttagtttttttttttttggaagaggacgttgtcgtgggtttggaagagtaggggtgggtttagagagtttttaattaagttattggtaggagtatttttgtagcgggtgaatgtcgaggggcgtttgtttaaatttggggaggggaaggatttgtggatatgggtgtttgttgttggtttttgtttagagaaaggtttttttttatttgtaaagttttttaaattttttgttattatttgtatttttgaggttgtatttttataaagggggtagaaggtattttaaatattattttcggtagttgggtcggagagtttggggttttttttgagtagtcggttttatatcgttgcgagtgcggttgtttgcgtgttcgtgagagttagaattttgtagttaggaatagtttttttttttaggtagtgttttgtgtgaatgaaatggtagtttttaaagttgcggagtttcgttattattttttgtatttgtatgtttttttttattttttgtcgtagatagtttgtatataaaaggagggcgggagggagggagcgagaggtataattttttttattttcgggagtagtgggtagagtggggggtttggagggaagattggggaatttggttagagggggcgtttattgtttattttttcggtttgtttcgtttgtttatttttttcggtgtgtttgtcggttgtagtgttggaggtcggcgtcggttttcgtttttcgcgttttttacgggaaggaagtattttcggtattaaaacgaacggggcggaaagaagtttttagtcgtcggtcgggaggcgagtcgatgtcgagttgttttacgtttattatgtcgggtatgatttgtaagaatttagatttcgagtttgattcgttatagttttgtttttattcggacgaagatgatttttatttcggcggtttcgattcgattttttcgggggaggatatttggaagaagtttgagttgttgtttacgttttcgttgtcgtttagtcgtggtttcgcggagtatagtttcgagttttcgagttgggttacggagatgttgtttgagaacgagttgtggggtagttcggtcgaggaggacgcgttcggtttggggggattgggtggttttatttttaattcggttattttttaggattgtatgtggagcggttttttcgttcgcgagaagttggagcgcgtcgtgagcgagaagttgtagtacggtcgcgggtcgttaatcgtcggttttatcgtttagttttcgggagtcggcgtcgttagttttgcgggtcgcgggtacggcggggttgcgggagtcggtcgcgtcggggtcgttttgttcgtcgagttcgtttattcggtcgtcgagtgcgtggatttcgtcgtggtttttttttttttcgtgaataagcgcgagttagcgttcgtgttcgtagtttcggttagtgtttcggcggcgggttttgcggtcgtttcgggggcgggtattgtcgttttagtcggggtttcgggggtcgttttttcgcgtttaggcggtcgttagattagcggcggcgattataaggtttttagtattttcggagaggatattttgagcgatttaggtaaagatcgaattcgggttcggttgtttttttggggtattggatttcgggtcgcgttttttttgttagtgttcgtatgttttggtttggggagtattttggaggtagtgttaggggtagagaggttttgttttttttaagttttttttcggggtaaagagaaggggttgagagaatgtcgttgtaaaaggggtgttttttaattttcgtttttattaaagttttttttatttttttttggggagtttttttttaggttattacgggtttttattcggttttttattttttttttgtagcgtagtttgaggaataaaattggagaaagttggtggttaaatcgggtgggggtttagggggttgttgggtgtattgtttggatagaaatttgttagcgtaggggtgaaagggattttttggtttaggttaggggagggaaagatattttcgagaagatttaagggttgtgtaaagttttgtttaaggcgtaggaatttataggagggttgtaatagatggttagagtcgattttttattttttttttttttttttttttttttttaaatgtcggtatttttttttttttttattttcggtgggtggtgggttatttgtttttggtgcgtggttagtaggcggcgatatgcgaggttagtaggcgggttcgggatttgaaaggttgggggtggtgggggtattttttttttttttatttagtagttggttgtaagtgtaatagtagttgtgtatatttttagggggttttttttttttagtgtgtagtggaaagtggttgtagttttgttttttagtttgaattttaggtttaatttgagatgtgagttgtatttgtaatttagtgtttttgaaggtgagggtaggtatttagtagtt

SEQ ID NO: 102 - DNA, 4501 bp, Artificial Sequence
  chemically treated genomic DNA (Homo sapiens)
ggttgttgagtgtttgtttttatttttaagggtattgggttatagatataatttatattttaaattaggtttggaatttaggttggaagataaaattatagttattttttattgtatattggaaagaggaggttttttgagaatgtatataattgttgttgtatttgtagttagttgttgaatggagggagggagggtgtttttattatttttagttttttagatttcgggttcgtttgttggtttcgtatatcgtcgtttgttggttacgtattaggagtaaatagtttattatttatcgaggatgggggaagggaaaggtatcgatatttgaaaaaaaaaaaaaaaaaagaaaaagaatagaaaatcggttttagttatttgttgtaatttttttataagtttttgcgttttaaatagggttttgtatagtttttgaattttttcggggatgttttttttttttttgatttgggttagagagttttttttatttttgcgttaataggtttttgtttaggtagtgtatttagtaattttttaaatttttattcggtttagttattaattttttttaattttattttttagattgcgttgtaaaagagaggtgggggatcgggtgagggttcgtgatggtttagaggagggttttttaggagagggtggaaggaattttagtgaaggcgagaattggagagtattttttttgtaacggtatttttttagttttttttttttatttcgaggagagatttgggggaaataggatttttttgtttttagtattgtttttaaaatgttttttaggttaagatatacgagtattaataaaggggacgcgattcggggtttagtgttttagggaggtagtcggattcgagttcggtttttatttgaatcgtttagggtgtttttttcggaggtattgagggttttgtggtcgtcgtcgttggtttggcggtcgtttgggcgcggaggggcgattttcggggtttcggttggggcggtaatattcgttttcgaggcgatcgtagggttcgtcgtcggggtattggtcggggttgcgggtacgggcgttggttcgcgtttgtttacgggaaaggggaagattacggcgggatttacgtattcggcggtcgggtgggcgagttcggcgggtagggcggtttcggcgcggtcggttttcgtagtttcgtcgtgttcgcgattcgtagggttggcggcgtcggttttcggggattgggcggtggaatcggcggttggcggttcgcggtcgtgttgtagtttttcgtttacggcgcgttttagtttttcgcgggcggagaagtcgttttatatgtagttttggaggatgatcgggttgggggtgaggttatttagtttttttaggtcgaacgcgtttttttcggtcgggttgttttatagttcgtttttaagtagtattttcgtgatttagttcgggggttcggagttgtgtttcgcgaagttacggttgggcgatagcgggggcgtgggtagtagtttaaattttttttagatgttttttttcgggggggtcgagtcggggtcgtcgaagtagaagttattttcgttcgggtagaagtagggttgtagcgagttaaattcgaggtttgggtttttgtagattatgttcggtatggtggacgtggagtagttcggtatcggttcgtttttcggtcggcgattgagggttttttttcgtttcgttcgttttaatatcgggggtgtttttttttcgtggggggcgcggaaggcgggggtcggcgtcgatttttaatattgtaatcgatagatatatcggagagggtgggtaaacggggtagatcgaggggataggtaatgggcgttttttttaattaggttttttaattttttttttaagttttttattttgtttattgttttcgaaggtggaggaagttgtgtttttcgttttttttttttcgttttttttttgtgtataagttgtttacgatagggggtgggagggggtatgtagatgtagggggtggtggcgaggtttcgtaattttggaaattgttattttatttatataaggtattgtttgggggagggggttgtttttggttgtagaattttagtttttacgagtacgtagataatcgtattcgtagcggtgtggggtcggttgtttaggggaagttttaggtttttcgatttagttatcgggaatggtatttggagtattttttattttttttgtaaaaatgtaattttaggagtgtaaatgatagtaggggatttagaaaattttgtaaataaaaaaaagtttttttttagatagagattaataatagatatttatatttataaattttttttttttttaaatttgagtaaacgtttttcggtatttattcgttgtagggatatttttgttaatagtttaattggaagttttttaagtttatttttgtttttttaaatttacgataacgtttttttttagggagggagaggttgagtttttgttttcgggaatggtaggggcgttcgcgcgaggagggtcgtcgggagagtcgttttttttttaagttggagtagtcgtgatttagattgcgatcgcggcggtttcgttttgtttaattttttttttttttttttttaggggtattttttggagaagaattttagtttggggtggggacgtatcggtttttcgatagtttaaatatagatagattttttagagtcgagggaattttttttcgtagaagttattatttttttcggtaagggttgtaaaaggattagggcgggttttttttagttaggatgttttcggggttggaattggtttttttgggaaaatttagagatggttttgtttcggaagtagaaatagtttttcgggtatattagggcgttcggtgcgtacgtcgtaatttcgtttagggtttgttttgtttcggcgttcgtcgtttttttgggcgtcgggcggtttgtaagttttgttttttatttttcgtcgattgtaggggattcggaggcgattttgcgcgggtgttttcgggtgggtcgggggggcgggggtgttttcggatggttatagtttgtgcgcgtttgcgtttggttagcgtttgttcggttttaatatagtttttaggagtttttcgtatttatttagcgcgtttagatagatgattgttatagtttgcgttttgaagttcgggggatattattaattgaaaaatttgatatattcggggggcggggagagaagggggttgtggcgtagataagggggagggagaaaggagaggaaagcggttttatttcgtttttttgatttttataaaaattaggggaggcgttaaggttttcgcgttaaaagttatttgtttttttttgtagagagaaggttgtaaagttgggaagtttagggtgtgtttttttcgtttttttggattttcgggtttgtatcggttgtattttgagaattagttgcgcgcggagcggtgtaatgtagtatttattttgcgagtttggtaattgtttgttattaaaagaaaaaaaaattacggagggtttcgggggtgtgtgttggggaggggagatcgatgtttttaatttagttttcgttttgattgcgtgttgtgtagttgagcgcgaggttaacgttgagtaaggttttgtagggaggttgtttttgtgtaattacgaaagaaggttagttcgaaggtgtaaaatagtagggagaggacgcgtttttttaggaataagatttttggatgtttttagttttaaattgaaagaagaggggcgttttttttgtttgaaaataaataaataaataagtgcgagttacgagggtggcgtcgcggtggttttttcggtcgaaggcgatatttcgcggagattgagtagaaagcggagttgttcggttttggcgcggatttggagtgcggttatttcgtaggtttttcgtcgttttcgcgggattgtttacgcgtttttattattgcggaggaggaggcggtttggttttgttttttagggggaatgggcgtacgttttttgtagtcgtttttagggtttttaagttaatttttttaaagttattattttttttagttatgggtaggcgaatttgatttatcgagatggaagtgttgtttatattttttgagatttagtttcggtttaaatagtttgattttaaattgttgaagggaaaaaggaaagttgttgttattatttcgtttttttgtgttttagtttttttaattgtgaaatggagttcgtagtgttttttatttgagagttatgaaagtttttataagtttttagtttataatagttgtgttagttattattatgatgatgattacgatatgttatttttttggggaaaataatatttttttgtttagtagtagtattggtttttttttttttcgttattattaaattttggttttattttattttggtttagttttttttataggtgtat

SEQ ID NO: 103 - DNA, 1446 bp, Artificial Sequence
  chemically treated genomic DNA (Homo sapiens)
ggagtcgttgggtttaggatggataatggttttcgttggtgtatgagatttaggttatttttttattttttgtggtttatttgtttatattgattgattgattggttgattaagatggttttgttttgttgtttaggttggagtgtagtggtgtagttataggttattgtagttttaattttttgggtttaagtgatttttttattttagtttttggagtagttgggaatataggtgtgttattatattagattaatttttatttttttttgtggagacggggttttattgtgtcgtttaggttggtttggaatttttgggattaagtaatttttttgtttcggtttgttaaagtgttgggattataggtatgaattacgggtttttattattacgttttaggaaatgtttatattggagtgtgttttttgtttttagttgggttttcgattggttattgtggtttaatggagtgtggtgtcggtagttgttagcgtttgttttttgagaggggtggcgaggggtatataggattagattgtttttattgttggatgattgggtaagtcgttttttttttttgggtttttgttttttaatatttaatattttgttgtgggttaagtgaagtttaagtttttttcgattttaatatgaggttgtttcggaatatttattttgtgttttgaatttaataatcggttgtggagggtattataggtaaatttgtattgtgagtgggttgttgttatttaattatttgatagtagttgcgaataggtgggtagtgtgttttttataggtagcgacgatttttggaggtggatttagaggtataattaagtcgcgcggcgtattagggtttaagggtatggggttttcgtagttgtggttggggtagagttggggttgtttttttttttaggagtataggcggcggtttagttttacgtttttcgtttttagttatattcggttcgcgtagtggggggtttaatagatttttttttttcgggttttagttttttcgttagtaagggcggataaggatttttttcgtttcgttagaggaggcgatcgaggggtttgagtttaggtataggtcggcgggtttaggaggcgcgaggcggatcgaattcgcgggaggagtaaagatttttgatgcgcggtcggagggcggggcggaggacgggatttacgcgattggtattttgtttttcgttttagttaatgagcggcgagggtgttttgggggcggggtagaattagtttttaagttgtagtgacgtttcggcgttattgttgcgttttatagacgtcgcgtgtattcggttgtttttaggcgttgttaggtatcgtttgggcgtcgttgttttggggttttggttcgggtttggtcggggttttttgatagcggcgggggaggcgggcgggcgtagggtgtcg

SEQ ID NO: 104 - DNA, 1446 bp, Artificial Sequence
  chemically treated genomic DNA (Homo sapiens)
cggtattttgcgttcgttcgtttttttcgtcgttgttagggaatttcggttaggttcgaattagagttttaggatagcggcgtttagacggtatttgatagcgtttgaggataatcgggtatacgcggcgtttatgaagcgtaatagtgacgtcggagcgttattgtaatttaaaggttgattttgtttcgtttttaagatattttcgtcgtttattggttggggcggagggtaggatattaatcgcgtgggtttcgtttttcgtttcgtttttcggtcgcgtattaaggatttttgtttttttcgcggattcgattcgtttcgcgttttttgagttcgtcggtttgtatttgagtttaggtttttcggtcgttttttttggcgggacgagaagagtttttgttcgtttttgttgacgagaagattgaggttcgaaaaggaaaagtttgttgggttttttattgcgcgggtcgggtgtggttggaggcgagagacgtgaggttggatcgtcgtttgtgtttttggagggagggatagttttagttttgttttagttatagttgcgggagttttatgtttttgaattttgatgcgtcgcgcggtttagttgtgtttttgagtttatttttaaaagtcgtcgttgtttatggaaaatatattgtttatttgttcgtagttgttgttagataattgagtggtagtaatttatttatagtatagatttgtttgtggtgttttttatagtcggttattaaatttagaatataaaatagatatttcgggataattttatgttagaatcggaagggatttggattttatttagtttataataagatgttaaatattggaaaatagagatttagagaaggaaagcgatttatttagttatttaatagtaggggtagtttggttttgtgtgtttttcgttattttttttagagggtaggcgttggtagttgtcggtattatattttattagattataatgattagtcgggggtttagttggaaatagagggtatattttaatgtgaatattttttaaaacgtggtggtgggggttcgtggtttatgtttgtaattttagtattttggtagatcgaggtaggaggattgtttgattttaggagttttagattagtttgggcgatatagtgagatttcgtttttataaaaaaaaataaaaattaatttggtgtggtggtatatttatgtttttagttattttaaaggttgaggtgggaggattatttgagtttaggaggttgaggttgtagtgatttatgattgtattattgtattttagtttgggtaataaagtaagattattttaattaattaattaattaattaatgtaggtaagtaaattataagggatggagaaataatttgggttttatgtattagcgagggttattatttattttaggtttaacggtttt

SEQ ID NO: 105 - DNA, 2501 bp, Artificial Sequence
  chemically treated genomic DNA (Homo sapiens)
ttagttttttttttttcgatttcggaataattcgacgttttagtagggagtagagtttttttttgatttttgtattttttttaatgtataacgagttttttgtttcgtttttttttagatggcggatttcgtatttgtttagattttttttttaggttttcgtttttttttcgcgtgttttagggatagtttgttatagttttttttttttttcggtgttttattttgtagattttagtttttcgggttaagtaggttgtcggtgaagaaacgcgtcgggttagtaatttcgttgagtagtattagtttcgttattttttttttttattttttaattaggagacggtttttaaggttcgtttttttttattattaattaattagttgatttttttaaaaaagggggcgtttcggaagttttatcgattagtaagagatttgggtgttgagtacgtgaattaatagatgcggatgattgtgtaggcgggtttaatgggagtatagtagtaggaagtaatttttagatagtgttatatcgttaagcgtatgcgttaaataggttttagtgataaagcgtttgggagatgtagtatttagtattaaggtttattattttttttagttattattaagtttagtttagatagtttttatgtgttttcggagatagataagttttttaaaaggggcgtattgtgattattgttattttttttaggaagttaaaagttgagaatgggatatgggttgaaattttttttttggttttttatttttaaattttatagtatagattataatttataagtttttgttttttttaaggtttaatttttaattagttaaatattttgcgtagattttgagttagttttgtattttggttttttttttgaatgattattttttttagttttttttgggttgttcggtttttgggatttatcgttagtatttttttgaggttagtagttgttttttttaggtttttaagggtagtttgggtaattttttttcggtataaggtttttaaatggttaggttttcgttttaatattcggttatagttttgggttgttaattgaggttgttttagtaataattgataggtagttagattggtatgaaggatagttcgttttggagggttaggtgggggtaaagttaggagtagtcgaagagttcgtttatagtatcgggtagtttttttagggtttttagttcgaaatagttttgtgttttttgtacgtttttttttggttagggtttttttttcgttagtttttagtttttaggagtttcggttttgagtgaaggatgttagtgtgagtttgataggaggtttagagtgtttaggtagttgaagttttgtttttttattttgatatatggattttaagtatttttttatgagttttttttaagttttttttttttatggttttacgtttatagttagttttgtttagttttttggcggttttgattcgaaaggaaattttaaagttagtattcggtagtaggagtttagtttgggtttgtttaagttatggttacggattacgatttttttgataaagtttttatcggggtagtattagagattagaagtttgaagggtttttggtatttgattggttgatttatgagatttatgagagttttttttaagtttagtaattagttttttagttttttgagtatgttttagaatttggttggttggatttgggtttatttttagtttaagcgtttcggtaggagggtttcggggttgttgtttaatttgaataattgaattaaggttttttcgaaggttttttttttatttttgttgcggttgagaggtgtttttttttttaattgtattgattggtggcgtttttatatggatgtttagttttttttacggtgagtgaatagttttggttagaaagggatgaattaggtttaggttagtatttgaaaagaaaattaaataatgttaatagtagggtttttatttagatttttttttcgtttttttttatttttttgagatttaggtttttagttttgaaagtttttagttttgtttttttttaaaaatttgttttagttttttcgttttatttatatataatttagaattataaattttataattttttgcggttaaggtagtcgcgttaattacggatattcggtcgggttaataagtatttgcgcggttaaagtgtttggtatggtgataggaggagtcgggttattcgaattatttttttttttaaagttaaatggttattgaatgttgttttcggagttttgttttacgcggagagggtagtcggagaggggcgcggtgcgggaggcgggggtagggggcggaataattgggaaagatattgataattaattttggagttcgcgagatttcgaatttagttaaatttttggtagttaatcgggagaagggaggaatttggttagttcgtttattgaacgtgatattatttttttcg

SEQ ID NO: 106 - DNA, 2501 bp, Artificial Sequence
  chemically treated genomic DNA (Homo sapiens)
cggaggaaatgatgttacgtttaataggcgggttaattagattttttttttttttcgattggttgttaggaatttgattagattcggagtttcgcgggttttagggttagttgttagtattttttttagttgtttcgttttttattttcgtttttcgtatcgcgttttttttcggttgtttttttcgcgtggggtaaggtttcgagggtagtatttagtagttatttagttttggaaggagaggtgattcgaatggttcggttttttttgttattatgttaggtattttggtcgcgtaggtatttattgattcgatcgggtgttcgtagttggcgcggttattttaatcgtagggaattgtggaatttatagttttaaattatatgtgggtggaacggggaagttggagtagatttttggaggaaagtaaaattggggatttttaggattaggggtttgggttttagaagaatgggaaaggacgagaaaggagtttaaataagaattttgttattagtattgtttggttttttttttaggtgttgatttgaatttggtttatttttttttgattaaaattgtttatttatcgtggaagggattaagtatttatatggagacgttattagttaatataattggagaaaaggatattttttagtcgtaataagagtgggaaaagaattttcgggagaattttgatttagttatttagattaggtagtagtttcgagatttttttatcgaaacgtttgagttggaagtaagtttagatttagttagttaaattttagagtatatttaaggagttgaaaaattggttgttgaatttgaaggagatttttataagttttatggattaattagttagatgttagaggttttttaagtttttgatttttggtattgtttcgatgggagttttgttaagaagatcgtaattcgtggttatggtttggataaatttaaattaggtttttgttgtcgggtattggttttggggttttttttcggattagggtcgttagagggttggatagagttaattatgggcgtagggttatggagggaggaaatttggggggagtttatagagaaatgtttggagtttatgtgttaaggtgaggaagtagagttttagttgtttgggtattttggattttttgttaggtttatattggtattttttatttaaggtcgagatttttgggagttggagattagcgagaaggaagttttggttagggaagaacgtgtaaggggtatagaattatttcgagttgggaattttgaaggagttgttcgatgttatggacgggtttttcggttgtttttgattttatttttatttggttttttagaacgaattgttttttatgttaatttggttgtttgttagttgttgttagggtagttttagttggtagtttagagttgtgatcgggtgttggagcgggagtttggttatttaaaggttttatatcgaaggggggttgtttaggttgtttttgggaatttggaaaaagtaattgttgattttaagaaggtgttggcgatagattttaaaaatcgggtagtttaggaggaattggggaaggtggttatttaggggaagaattaggatgtagggttggtttagggtttgcgtaagatgtttggttgattaaaagttaaattttaaaagagataggaatttgtgaattgtggtttgtgttgtgagatttgggggtggggggttagagggaaggttttagtttatattttatttttagtttttggttttttaggggaggtagtagtggttatagtgcgttttttttgaggggtttatttattttcgaggatatatagaagttgtttaaattaaatttagtagtggttgggggagatggtggattttaatattgggtattatattttttaggcgttttattattggagtttgtttggcgtatgcgtttggcggtatggtattgtttggaagttattttttgttgttgtgtttttattgggttcgtttatatagttattcgtatttgttgatttacgtgtttagtatttaggttttttattggtcggtagagttttcgggacgtttttttttttgaaagagttaattgattagttggtgatggggagaggcgggttttgggaatcgttttttggttggggggtgggggggaaagatggcggagttgatgttgtttagcgagattgttgattcgacgcgtttttttatcgataatttgtttagttcggaggattggggtttgtagagtgaggtatcggggaggggagagggttgtggtaaattgtttttgaggtacgcgggaaagaagcgggggtttaaagaggaagtttgggtaaatacggaattcgttatttgaaggagagcggagtagggggttcgttgtgtattaagggggatataaaagttagggaagaattttgttttttgttggaacgtcgagttgtttcggggtcggggaaggaggggttga

SEQ ID NO: 107 - DNA, 3001 bp, Artificial Sequence
  chemically treated genomic DNA (Homo sapiens)
ttgttataattgggtcggtaggggaagaagggaagggggatttggatgggttttcgtaaaataggtgaaaataaggggtgaagagtaggggattgaggaatagtaaaggaaaataaagatattatttttaatagaagagttggaggggggaaaaaaaaagtaagatttaattacgattttttttttatttttagtttttattttttttaaattaggaaatttttatttggaaagaaaaatagatataaaatataaaaacgaaaagtaaatataatagaatagaaaaagtagtattagggaaagtggttaggatagaggtttttaataagattagtaattatagtagcggaaattagaaaagttggaaggggaagattaatttataaatttttgatttgaaagtaatagtgaggaaatagaatagataataaaaggtaaaatatgattaataatttagtaaagtggaaaatggagatgataagtagagttttgaaaagtttttaaaggaagatttcgttttttttattataattttatcgttatggatgtttaatttagtagttattagttaagggtgatagatgagggttattattgcgtaaagcgtttatttttcgaaaagaaaatattatatggtcgtcgtttattttttatagtttttagttttttattttttagtattttttttttcgttgtttaagtaagttttgtgtaattagtatgggggggaggggcggtgtaagataaatggttcggttataaaaaaataaaatttatgtttttattttataataagaaagttaataggtgatagagaaaggtaattttcgtttaggttttaataggatttttattaagtggttttatattattgttacgttacgaaggtgagattttttttggagaaatatataatgatattaatcgtatcgtaaatatttggaaggtattttaaattaagttgggtaagttaaggtgagaaaaatttaattgggtttagaaattagtttttttttttagttttatcgagggtcgaaaaagagtttaagaaagaataaggaaggtgagaagagtttcgtttttcgtaaatattaagattaagggacgtcgagtatcgttttttattgatgttgaggtttttaatatgagaagaatttattggaagaagggagtaaaacgaatataatggcgtcgaggatattattttggattgggtttttttttagtttttttttttttttttaggagttttttgttttcgaaagggatgtaagttaaggaaatagcgaattaattaggttttagcgattagattatcgtttgtgaaaagggtattaggaatttatgtgacgggatgggtgcggagaagcgtagatggaaacggattgtagcgaaggttaaagtttatttaaatagggagagcgcgtatggcggtagtaatagcgacgaaggagggaaatttgtttttattttcggttgtaggtttttttttattttagtttttcgtttttttggttgtaagagcgtaggcgtaagggatcggaaatagggtttttcgcggttatatagattcgtgcgttttaggtttgtttttggaaaatgtttgtttgaaatttgttttaaaatcgtttttaattttattgttatcgttagtaataaaagatataaaggaaattaacgtttgttttttattgttatttttatttttttattttatttttttttatgttttttattttttcgtttaggtttttgttacgtaggttttttttgtaggtattttttcgtggatgcgcgaggaacgagtgtggcgaaggttgcgagtttttacggggtttttggttcggtagtgaaggtgatttgaggattgttgggtacgtattaggaatcggtaggttttagttgaggggagggaggagggaagttttagggaattggattgttcgggggtgtttttcgatttttttttagtcgtggggttggtgggcggtatttttttaaaaggatgttgttcgaggtagttgatgttttagggttagtgagttaggaaggtgttttgaattcgagcgggaagacggggtttggattcggttttaagtgttaatagtagggtttgagggttatattatattttattaatattgtttttgtttttgttttgagatagagtttcgttttgtcgtttaggcgggagtgtaatgttttgatttcggtttattgtaatcgttgtttttcgggtttaagcgatttttttgttttagtttttcgagtagttaggattataggcgttcgttattacgtttagtaaatttttgtttttttagtagagacggggttttatttatgtatgattttaggtgatttatttatttcggttttttagagtgttgggattataggcgtgagttatcgcgttcggtttattaatattgttaattcgagtagaatgtttttggtttcgttttaatagttttattgtttaatttggattttttttttgaatgaaatatttgttattttcgtttttgagatggggagttataaaagtaagatttgatgttttgttgtgtaataaaataataaacgtttggttttttttttgttagtatatttaattatttaatattaaggagtaggtatcgttatttttattttattgatagaagcgaagtaaagtaatatattttaagtagtacggttggtgaggttatagttaggatgtaaatattttttattttttattgtattttgtttttttgtttaaagaatttggttagtaaatatattgtaggttattttattggtttaaatttttggtgaagtaagtttgtttttagtgataaatgaagtaattaatttaagaatggtgttatagaaggtatttttttaagtattatttaatttatttaaaagtatttattaattgttttttttgtgttatatgttgttttaggatttggggatataacggtgaatagttttgtttttatagtgtttatat

SEQ ID NO: 108 - DNA, 3001 bp, Artificial Sequence
  chemically treated genomic DNA (Homo sapiens)
atgtaaatattgtgagaatagggttgtttatcgttgtgtttttagattttaggataatatgtggtataagggaggtagttgataaatatttttgaataaattaaatgatatttgggaaaatattttttatgatattatttttgaattagttattttatttgttattgaagataagtttattttattaagaatttgaattaataaggtaatttgtagtgtatttattaattagattttttgagtagggaggtagaatataatagagaatgagagatgtttgtattttggttgtaattttattagtcgtattgtttgagatatgttgttttgtttcgtttttgttaataagatgagaataacggtatttattttttagtattaaatgattaagtatgttaatagggagagggttaaacgtttgttgttttattatatagtaggatattaggttttatttttgtggttttttattttaaagacggggatagtaaatgttttatttaggaaaaaaatttaggttgaataatggggttgttggggcggggttaagaatattttgttcgaattaatagtattaatgggtcgggcgcggtggtttacgtttgtaattttagtattttgggaggtcgaagtgggtggattatttgaggttatatatgggtgaagtttcgtttttattaaaaaaataaaaatttgttgggcgtggtggcgggcgtttgtaattttagttattcgggaggttgaggtaggagaatcgtttgaattcgggaagtagcggttgtagtgagtcgagattaggatattgtattttcgtttgggcgatagggcgagattttgttttaaaataaaaataaaaatagtattaatggaatgtagtataatttttaagttttattattaatatttggggtcgaatttagatttcgttttttcgttcggatttagaatatttttttgatttattggttttagggtattagttatttcggatagtatttttttgggaaaatatcgtttattagttttacgattgggaaagagtcgggaaatattttcgagtaatttagttttttgagattttttttttttttttttttagttagggtttgtcggtttttagtgcgtgtttagtagtttttaggttatttttattatcgggttaaggatttcgtgggaattcgtagttttcgttatattcgtttttcgcgtatttacggaggggtgtttatagagaagatttgcgtggtaaaaatttaaacgaagagatgaggggtatggagaggagtaggataagagaataaagataatagtggggggtagacgttagttttttttatattttttgttattggcggtagtagtgaagttagaaacggttttaaaataaattttagataggtattttttaaaggtaagtttggagcgtacggatttgtataatcgcggaaggttttgttttcggttttttgcgtttgcgtttttgtagttaagaaggcgggaggttggagtagagggaagtttgtaatcggaagtgaaggtagatttttttttttcgtcgttgttgttgtcgttatacgcgttttttttgtttaggtaagttttggttttcgttataattcgtttttatttgcgttttttcgtatttatttcgttatatgggtttttgatattttttttataggcgatggtttggtcgttggggtttagttggttcgttatttttttagtttgtatttttttcgagagtaaagagtttttgggggaaggaagggaagttaaggggggatttaatttaagatggtgttttcggcgttattgtgttcgttttgttttttttttttaatgggttttttttatattggaggttttagtattaatgagaggcggtgttcggcgttttttggttttggtatttgcggagggcggggttttttttattttttttgtttttttttgagttttttttcggttttcggtgggattgggaggaggagttggtttttgggtttagttggattttttttattttgatttgtttaatttaatttggagtgttttttaagtgtttacgatacgattggtgttattgtatgtttttttaaaaggagttttattttcgtagcgtaatagtgatgtgagattatttggtaaagattttgttaaagtttgggcggggattgtttttttttgttatttattagtttttttattgtagggtggagatatgaattttgtttttttgtggtcgagttatttgttttgtatcgttttttttttttatgttaattatataaggtttgtttaaatagcggaagggaggatattgagaagtgggaggttgagagttatgggaggtggacggcggttatatgatgtttttttttcgaaaggtgagcgttttgcgtagtgatgatttttatttattatttttgattgatggttgttgagttaggtatttataacggtgggattataatagggaaagcggagtttttttttgaggattttttaggattttatttgttatttttattttttattttattaagttattagttatattttattttttattatttattttatttttttattgttatttttagattaagaatttataagttggttttttttttttaatttttttggttttcgttattgtgattgttaattttgttgggaatttttgttttaattattttttttggtattgttttttttgttttgttatatttgtttttcgtttttatgttttgtatttgtttttttttttaggtaaaagttttttggtttagggaaagtgggaattggggatggaaaagaggtcgtgattaagttttgtttttttttttttttttttagtttttttgttagaaatagtatttttgtttttttttgttgttttttaattttttattttttattttttgtttttatttattttgcgagaatttatttagatttttttttttttttttttttgtcggtttagttatggtag

SEQ ID NO: 109 - DNA, 5477 bp, Artificial Sequence
  chemically treated genomic DNA (Homo sapiens)
tataaggattgtgggttttttaggggtttcgtgttaggagttagaaggggtatagattgtttttttttaatagttgtattatttgtttagagttagattgagtttggagggttttggaagttagaaggattgatatggggttggaggtagggaaaggttgttggaagagggagaaattgaggatttacggtttttaggtagtttgatttgttttaggtttggttggggtttgttttcgttataggtggttacggtttttttgtaagaattgttggggtttttattatagttgtagtatcgtattcggttttttggtaggagaaaagaggcgttggatttgggttttcggtggagtcggttggtagaaggtttgtgtgagaagttagttggtcgtttttttatttaaggtagtttttagtagggagttgagtaagattttaataaattggggttttatcgtagtttgttcgtgttaggatcgtttttattttttgtttatttttttttttagttcggttttgtttgttttatatttttcgtgttttgagttttatagggttataaaaaaggaagaaagagttttttttagtaggtattaagggttttagtggggatagggaggggttttatagtatgtttttagtattttttggagtttttaaatttttttatttttagtagtagtttgtggattaataagaatttttgaggatttttgatatttttttatagggtttttgagggttttttttttgtaattatttgtgtaaggttagattttttttatatattggattttaacgaaaataatatattttaatagattgaatgtagaagtagataggaaaatttaggtattttttacgaagtttgatattagatttataaaaatgtaaagtaatgtttagttttttattgtgttgtggagaaataatagttattttttataaaattgtattttgttagtatgtaatattttattatttttattgtttaaataaattaataaatatttattttaaattttttgttttaatttttaatgtagtaaatattgatataattttataaagaaaagttttttagagttttaagtaattttgaaaagtgtaaagaggttttgagattaatatttttgaaaagagttgtttttttgggtatttgtgttttttttatttttattttttgtttttagttttattttttttggtatatgttggttttgattttttagatgggttttttttttttttagtttttttaattttagttttttaggttgtattattatttttttattttaaattttatttatgtttttttttttagtgatttttttttagtgtaagtatattagtaggttttttagttttattcgtggttattttttttttttaaggtagtaaagttggtagggataattatagggtaggaatgttgaagtttggggggattaaagggatttgaagttgggtggggttcgtttttatatagttgggttttgtgtgtgtatgtgggtgtgtgggtgggggtattgttgattttatatttaaatagatttacgtcggggttgtttaggagggtgattttgagagatatgaaagtattgagggggaaagatagagaaaataaagatagagagaagttgagagagttagggagtagtttgagatatggggagggagggggaggagtaggagggaaggcgatagatataatttaggagtaggagaggaagttaagttatagagataatatgttgagagagtagaggagattttttaggtaagggtagattttttgtaggggtaggttgggggttttcgttgtttgttgggttaggttggtgaatttggttatggtttcgttttttagatttattttttaggtgtgtttgtttattggttttttattgttttgtttaaatgttttaattttataaatttcgggatttcggggtgtagattattttttttagatttttgagtttgtgtttggttatgggtatttttagtatttttttttgcgtgttgtttttttgtggggtattgggtaagggtgggttggggaatttttagtggttagggggttgggggtggggataagggtatgtggaggaatttgagggttggggaggagaggggtgtgggtgttggaagaggttaagaagagagttgggggagtgggggattttagggagattagttattgggaaggttagtttgatgaggtgggaaaggaagagtttttttttaaggtatttgagaataattgttttttttttgttgtatttttgattcgtttttgttttttttattttttattttacgtgttgtttttgtgttgggttttttggttaatgttaatttttatttttttatttgtttttggtgttatttatttaatttttttattgatttttttaatttttttgttgttgggtttggttttttgttttattttttttatgttggtttttgatttttgtggtttttgtttatgtttgcgtattttttaatttttgtattttttttgtttttatttttgtttttttttttgtatcgtttttttttttttttttgagatagagtttcgttttgttatttaggttggagtgtagtggtatgatttcggtttattgtaattttagttatttagatttaagagatttttttgttttagttttttaagtagttgggattagaggtatgtgttattatgttcggttaattttttgtatttttagtagagacggggttttattgtgttagttaggatggttttaattttttgattttatgattagttcgtttcggttttttaacgtgttgggattataggcgtgagttattgcgtttagttattttttttatttttgttagttttttttttttattttatagtttttttttttttgttttatgtgttatttttttttgtgattttttttcggatttggtttttgtttgttttatagggagggtttgttttttttgtttttttaatttttgttgttttaataggttttattatgttttttgttcggggaaggtttcgttgttatatttgtggttttattaaattttgttattttgtttttatcgagtgtcgggacgatgaagtttgtggtattagtattggtattttaggtaggattttggtttaatggtttttttttaggaggttttttatttttatttattcggttttttttgtggttttcgttttagtatgttttttttattttatagattagagtgagattattgagtgaaaaagttgttttttaagggtttagtgttttttgttaggttatgttatttattggttgtatttttatattttgtggtattattgttgcgagtaggatttgtgtaatatagtcgtttttttatagtagtttattagttttttcgtttttttgtttttttttgtggttagtttcgttgggagaggatattttttttattagttttcgtggatttgtagtttttaatttaggatatttttcgttattattgcggttttggaaatatttgtatagatattttgagatatgttcgagaatttaattttgtatagagattttagattttttagtagattttttatagattttttataaggtttggggaggtatttgtttagagtttaattttataaagaatatttattttgcgttttttgttttttttagatgtttattgttgatgtttcgtgttagtttaggttattggtaaggtaggtattttgatgatattgtggattttaggtaaggggattaaaggagtattaggtatggtaaggaggagagttttgttaggaaagattaatgtggtaggtcgggaatttaggatggagggtttgggggattatgaagagtatttttaataaaaggtttatttaggagtttagtaatattgtagatattgtagtgtgtgtgtgtgtgtgtgtgtgtgtgtgtgtgtgtgtgtttgtgtgtgtgtgttttaagagtaaattgtagttgtttggtgggttgggttggagttggaatttggattacggtattttttttattttttatttgtgttattttcgtttttttttttgttaatggtttagtttaagtttttgtagtttgaaggttttaggtgagatttttgagaaagtttttttttagtaaggtttaagtttgagtagagatataaaagggtatttagtggagttgtttgtgagggtgtggttggagtttagtttatttttgtttgagattagggaatggttaagttgggagtattaatattttttttcgttttattagtttagattcgtttatggtttatagatattttagtatggtttcggtttaataaataatatatttttattgggtttgttagtttgagtagatattttttttgttttcgagaaatagggtgtgattttagggtagtaggaaggaagtgttagagtggcgatagttgtttatatgttttgaatgtttcggtaaggcgttatagggaagagtgtgtgtttaggataaggaaggataaggagggggtttcgggtgggagttgagtataggtatttttattttgatttagttttttttttttgtatgtgaggaagtttggggttgattaaatatgtttgtttttttttttttttgtgaggatgagatatggggtagtgggggtttggtttaatttagagatgggttgaggttttttattttttttgtttttttatttttttattttgtgtttttatttttttttttttgtttatttttttttattttttttgatttgagttttttttttttttttttttttttcgttttttttatttgttttttagttttattgtaatggattttttattattgtttaagtttttagatttttgttttttttttgtgtatatttattttttttgtttttattagtaattttaggttttttttaattttatagtattatgggtttagggttatttttttattgttgttataagataggagattaaatttttttgtaggttatattatagaataatgtttttttttttttttagttttttatttttttttatatatagtttggtggttgttggaggttagttggatggtgaagtcgaatttttagtttcgttttttttgttaaggttgtcgaggaattttttaggtgttagatggttagcgagatagtaggttatattttttagtagatgttattaaaattatttgggtttgtgggtaggtgggttgtggggttttttagagagatagattaaggatatttttattttttatatttttaggaacgagggtttatttttaatttaattcgtgttttttttttatttttagttttttttaggatttaagtttttgttttttagttgttttttatttaagacgggttaaatggatgtttttatagatttggatttcgggtttgaattgaggaatcgaggtatttggggagaaggag

SEQ ID NO: 110 - DNA, 5477 bp, Artificial Sequence
  chemically treated genomic DNA (Homo sapiens)
ttttttttttttagatgtttcgattttttagtttaaattcgaaatttaggtttatgagaatatttatttggttcgttttgggtgaggaatagttagggaatagaggtttaaattttggaggggattggggatggagaggaaatacgggttgggttggggatgggttttcgtttttgaggatgtgaaaagtagaggtatttttaatttgtttttttggaaaattttatagtttatttgtttataagtttaggtgattttggtgatatttgttgggaagtgtgatttgttgtttcgttggttatttggtatttggaagatttttcgataattttagtaaggggggcgggattgagagttcgattttattatttagttggtttttagtagttattaagttgtgtatggggaggggtgggggattgaaggaaaggaggagtattattttgtgatgtaatttataaaaaggtttggttttttgttttgtagtagtagtggagggatggttttgagtttatagtattgtggggttgaggggagtttgaggttgttggtgggggtaaggaggatgggtgtgtatagggaggagataggaatttggagatttgagtaatggtggggaatttattgtagtggagttgaaggataaatggggaaaacgggggaagagagagaagggaagagatttaagttagagaaagtggaaagagatggatagagggagaaaaatagaagtataaagtgggaggatggagggatagagaaaatggaaagttttaatttatttttaaattaagttagatttttattattttatgttttatttttataaagaagagagggaataggtatatttaattaattttagatttttttatatgtaaggggagggaattgagttaggatagagatgtttgtgtttagtttttattcggggttttttttttatttttttttattttaggtatatatttttttttgtggcgttttatcggggtatttagagtatgtgagtagttatcgttattttggtattttttttttgttgttttgaggttatattttatttttcgggggtagagggagtgtttatttaggttggtaggtttagtgggggtatgttatttattgggtcggggttatgttgggatgtttgtgaattatgggcgagtttgggttggtgaagcgagggagggtattgatgtttttaatttggttattttttagttttaggtagaaatgagttgagttttagttatatttttataagtagttttattgggtgtttttttgtgtttttgtttaagtttgggttttattggaaaaaagtttttttagaagttttatttaaagtttttaggttgtaggggtttaaattaagttattggtaagaaaaaggacgaaaatgatatagatggagaatgaggggagtgtcgtggtttaggttttagttttagtttaatttattaagtagttatagtttgtttttagagtatatatatatagatatatatatatatatatatatatatatatatatatatattgtagtatttgtagtattattggatttttagatagattttttattaaaggtattttttatagttttttaagttttttattttgagttttcgatttattatattagttttttttagtaagatttttttttttattatatttgatgtttttttgatttttttgtttgagatttatagtgttattaaaatgtttgttttgttagtgatttgggttgatacggggtattagtaatgggtatttagaaaagataaaagacgtagaataggtgttttttatgaggttggattttgggtaggtgtttttttaggttttgtgaggggtttgtgaggggtttgttgagagatttggggtttttgtataaaattaggttttcgggtatgttttaaagtgtttgtgtaggtgtttttagggtcgtagtgatggcggggggtattttgggttgggggttgtagatttacggaagttagtggaggaggtgtttttttttagcgaagttggttataaagaggggtagggaggcgaggaggttggtgagttgttgtggggaagcggttatgttgtataggttttgttcgtagtagtggtgttatagagtgtaggagtgtagttagtaggtggtatagtttggtagagggtattgggtttttgagaggtagtttttttatttagtgattttattttggtttgtgggatgaaagaggtatgttgaggcgggggttataggaaaggtcggatggatggaggtagggagttttttggagaagggttattggattagagttttatttgaagtgttaatattgatgttataagttttatcgtttcgatattcggtgggaatagggtggtagggtttggtgaagttatagatgtagtagcggagtttttttcgggtaggggatatggtgagatttgttgaggtagtagagattaggagagtaggagaggtaaattttttttgtggggtaggtagaggttagattcggagagggattatagagagaggtgatatatgaagtagagagaggaaagttgtggaataagggaggaaagttgatagaagtagaaaaaatagttgggcgtagtggtttacgtttgtaattttagtacgttgggaggtcgaggcgggttgattatgaggttagaagattgagattattttggttaatatagtgaaatttcgtttttattaaaaatataaaaaattagtcgggtatggtggtatatgtttttagttttagttatttgggaggttgaggtaggagaattttttgaatttgggtggttgaggttgtagtgagtcgagattatgttattgtattttagtttgggtgatagaacgagattttgttttaaaaaaaaagagggagacgatgtaggaaaagaaatagagatggaggtaagaggggtatagggattgagagatgcgtagatatgaatagaagttataagaattagagattaatataaaaagagtgagataaaaagttagatttagtagtaggaaagttgagggggttagtgaaaaagttaagtaaatggtattagagatagataggaaaatagaaattgatattgattaaagggtttagtatagaagtaatacgtgaaataagggataggggagataggggcggattaaagatgtagtaagggggagatagttatttttaaatgttttgaaaggaaatttttttttttttattttattaggttggtttttttagtggttggtttttttgaagttttttatttttttagttttttttttggttttttttagtatttatattttttttttttttagtttttaggtttttttatatgtttttgtttttatttttagttttttgattattgaaggttttttagtttatttttatttagtgttttatagaggaatagtacgtagaggaagatgttggaggtgtttatggttagatataggtttaggaatttgggagaggtgatttgtatttcgagatttcgggatttgtagagttggagtatttgagtaagatagtgaggaattagtaaataaatatatttagggagtgaatttggggggcggaattatgattagatttattagtttgatttagtaggtagcgggggtttttagtttgtttttgtaaggagtttgtttttgtttggagggttttttttgtttttttagtatgttgtttttgtaatttagtttttttttttgtttttgagttgtgtttgtcgtttttttttttatttttttttttttttttttatgttttaagttgttttttggtttttttagtttttttttgtttttgttttttttgttttttttttttagtgtttttatgttttttaaagttatttttttaaatagtttcggcgtggatttgtttgagtgtagaattaataatatttttatttatatatttatatgtatatataaagtttagttgtgtaagggcggattttatttagttttagatttttttgatttttttaagttttaatatttttattttgtaattatttttgttagttttattattttggaggaaagaaataattacgggtggggttggagggtttgttgatgtgtttgtattggggagaaattattagaaaggaaggtatggatgggatttggggtaggggggtggtgatatagtttggaaggttggggttgaagagattgggaaggaggaaggtttatttggggaattagagttagtatgtattaggaggagtaagattaggaatagggagtgaagataggggagatataggtgtttaggagagtagttttttttaaaaatattgattttaggatttttttatattttttaaagttatttaagattttgaagagtttttttttatgaggttatattaatatttattatattaaaaattaaaatagaaaatttaaagtaggtatttattgatttatttaaataataaaaataataaagtattatatgttaataaaatatagttttgtgaaaaataattattatttttttatagtatagtgagaagttgagtattgttttatatttttgtgaatttagtgttaggtttcgtgggagatgtttgggtttttttatttgtttttgtatttagtttgttgggatatgttgttttcgttgaagtttagtatatgaagaaaatttgattttatatagatagttgtaaaaggaggatttttaaggattttgtgaaagggtattagggatttttaggggtttttgttggtttatagattgttgttgaggataaaggagtttgaggattttagaggatgttgagagtatgttgtggggtttttttttgtttttattggggtttttggtgtttgttgggggagatttttttttttttttttatagttttataaagtttaaggtacgggggatataaggtaggtagagtcgggttggggaggggggtgggtaggaggtagaggcggttttgatacgggtagattgcgatgaaattttagtttgttgggattttgtttagttttttgttaggggttgttttgggtaaggaggcggttagttagttttttatataggttttttgttagtcggttttatcgagggtttaggtttagcgtttttttttttttgttaggaaatcgaatgcggtgttataattgtggtggaagttttagtagtttttgtaaagaggtcgtgattatttgtggcgagggtagattttagttaggtttggaatagattaagttatttggaaatcgtgagtttttagttttttttttttttagtagtttttttttgtttttagttttatgttaatttttttggtttttagaattttttaggtttagtttggttttgggtagatggtgtagttgttagaggagagtagtttgtattttttttggtttttggtacggagtttttgagaggtttatagtttttgtg

SEQ ID NO: 111 - DNA, 6944 bp, Artificial Sequence
  chemically treated genomic DNA (Homo sapiens)
gaagttttataagatcgaagtggagttattggagtgttttaggtgaagaaacgatatattttgatttatagtagtaggattattgtggagagaatatttaggtggtaggtaatggaatagtgttagagttattatttaggagtgatagagtggtggggattaagggaagaggagggtttgagggatgagagggacggagggaagggttggagaagtaggaggtgaggagaaggagtagagggatagaatttgaaagtagtagaatttttagttttaaatatattgttttataaatttttaatatatttatttatagagtttagtagggtgttttttgtatttggtttttaatattttatgtgggattgtttaaaaattaattgttttttttgtttttttttaggtttaaaaaaatattaagtgttttaataaaatatgtatattatttagatgcggatattttttaaaaataggaagtgtatgagtattggtgaggggtattgtgattgcgttgaatatttgtaattttgaggtgaatgaatgtattggtttttggttgtaatatataattatacgttgtgttattttgtattgttaggagatgttttggatttttatagaaatttagggttatggaatgaaggtaattttagaatataataagagttatagatatatagtttgggaaagtaaaatttaggagttttgagagttgtataattgtaatgtatttagatatatttatatattaaggggttaaagtaatagtttttatatataagatttttgattggtcgggcgcggtggtttatgtttgtaatcgtagtattttgggaggtcgaggcgggaggattacgaggttaggagatcgagattattttggttaatacggtgaaattcgtttttataaaaaaattagtcgggcgtggtggcgggtatttgtagttttagttattcgggaggttgaagtagaagaatggcgtgaattcgggacgtagagtttgtagtgagtcgagatcgcgttattgtattttagtttgggcggtagagagagatttcgttttaaaaaaaaaaaaaaaaaaaaaaaaaaaaaaaaaaaaaaaaaaaaggtttttgataatttaggggttattaagattttattatttattgtagttaataaaaaaaaaaaagaaagaaagaaattggtttttgttttattttatatgtttaggtataatttttttagagaagaagaggaggggggcggggaggagtaggaggaggaggaaagaaggaggagaaggagaaggagaaggagaaggagaggaagaggaagaggaagaggaagaggaagaagaagaagaagaagaagaagaagaagaagaagaagaagaagaagaagaagaagaagaagaagaagaagaagaagaagaagaagaagaagaaaaggaagaagaagaaattgtttttatatttttatttttaggataagtttattgtttggtattaagttttttggggtgaatttttttttaaaagagttcggggagtttaggtatggaatgggaggtagaaagtttaattaagggattgggatttcggaatgaataatgaagggagatggattgggtttatgtcgaaggtttttttttggttttttagttttcgggcgaagatttagggagatattgagatatattttgtataggagggggagggggagggggagggtaaagttttagggttttaggagtggtttttaagggtttaggtttcgaggcggtgtttggggttgggaggtttagtattgagaattttttatttttttagagttttttttttttttttaattcgtgttaggtttttttttttggatatttataacgcggttttattttttatttttattgggcgtcgcgtttttagagaagttaattagtgtcgtcgtagtttttaggttttaaagttttacgtatttcgcgggatttatattttttttagacgcggaggttggggttatggcgtttcgaagtttttttttgttgtttttaggggttttggttttgatcgatatttgggcgggtgagtgcggggtttagagagaaacggtttttgtggggaggagtgaggggttcgttcggtgggggcgtaggatttagggagtcgttttcggaggagggtttggcgggttttagttttttttcgtttttaggtttttattttttgaggtattttagtatcgttgtgtcgcggttcggtcgcggggagtttcgttatatcgtcgtggagtacgtagacgatacgtaatttttgcggttcgatagcgacgtcgcgatttcgaggatggagtcgcgggagtcgtgggtggagtaagaggggtcgtagtattgggagtggattatagggtacgttaaggttaacgtatagattgatcgagtggttttgaggaatttgtttcgtcgttataattagagcgaggttggtgagtgaattcggtcgggggcgtaggttacgattattttttattcgttacggatcgttcgggttttttagagttttcggattcgaaatttatttcgaggtagcgggattcgtttagattttttattcgggagagttttaggcgtttttatttaggtttatttttagtttaggttaaaattttcgcgggttgggcggggagggggcggggttagttgggcggggttgattgcggggatcggttagggttttatattttttagggaatgaatggttgcgatatggggttcgacggacgtttttttcgcgggtattattagtacgcgtacgacggtaaggattatatttttttgaacgaggatttgcgtttttggatcgcggcggatatcgtggtttagattatttagcgtttttatgaggtagaggaatatgtagaggagtttaggatttatttggagggcgagtgtttggagttgtttcgtagatatttggagaatgggaaggagacgttatagcgcgtaggtattaggggttatgggcgttttttttattttttgtagattttttgggatggtttcgtataaggttgggaggaaagtggatttaatgttaggatatcgttttttttttagttttgagtaggaagaatttttttggttttcgagattcggtattagagagtgattgtgagagttcgttttgttttttgggataattaagggatgaaatttttgagggaatggagggaagatagtttttggaatatcgattcgcggttttttttgagttttttaatagttttgggtttcgtgattttttttttaagttttgttttttgttttatatttaatgtgtttgaggttttgattttagtttttcggtttttatttaggttagggttagaagtttttgttttttttttagagattttaattttttaaggaataggagatttttttaggtgtttgtgtttaggttggtgtttgggttttgtgtttttttttttattttaggtgttttgtttatttttaggttggttatatgggtgttgttggggttttttatgaggagtgtaaagtgtttgaattttttgattttttttagattttttaaaggtatacgttgtttattattttatttttgattatgaggttattttgaggtgttgggttttgggtttttattttgcggagattacgttgatttggtagcgggatggggaggaatagatttaggatatagagtttgtggagattaggtttgtaggggatggaattttttagaagtgggtcgttgtggtggtgttttttggagaggaatagagatatatatgttatgtgtagtacgaggggttgttttagttttttattttgagatggggtaaggagggagatgggtaaagaggggaacgaggggttatgtttttttttagggaaagtaggagtttttttggagttttttagtagggttagggttgaggtttggagattagggttttttatttttttttttttttttagagtagtttttttagtttattatttttatcgtgggtatcgttgttggttttgttgtttttggagttgtggttattggagttgtggtcgttgttgtgatgtggaggaagaagagtttaggtaggaaggggtgaggagtggagtttgagtttttttgttttattgggggttgtaagttttaagtagaagtgtgttttgttttattattgggaagtattatttatatttatgggtttatttagtttgggttttgtgtgttagtatttatttatttgtaaagtttttgtgaaaatgaaggatagattttttatttcgatgattatggtggtgatgggatttgattttagtagttataaattataggggaaggtttttgttgatgatagattttaggagggtagttggtttaggatttatatttgttttttttatattttttgattttgttttggatttatagttatatttttttggaaatttttttgggattaaagattaggggtttgttttaggattttatggttttgttttttttttggttttttataggatattttttttttatagatagaaatagagggagttatttttaggttgtaggtaagatgaaggaggttgatttttgagattgttgggatattgtggttaggagtttatgagggagtttatttattttatagtttttttagttatatttgtgggttttgattaggttttgtttttgttttattttaattattgatagtgtttagggttttggggtgttttttatagttaataaaggtgatattttagggtaggggttttgatgtgagtggggtgttgggggggaatagaggggatttagttgtgttattgggtttttttgatttggatgttttgagtatgaaatgggttatttagagtgttattttttattgtgattgatacgaatttgtttatgaatattttttttatagtgtgagatagtttttttgtgtgggattgagaagtaagatattaatgtagtagaattgtatttgtgttttacgaatatatataaattttaaaaataaagaataaaaatatatttttttatagatataggtagatatgtttttatagtatgtacgtaaatgtgtgtgtgtgtgtgtgtgtgtgaagagaaagagtgaatagagagattaagatttttttaatggtgaaaagatatatatatatttggaattagttagtttgatttagtttaggtgattttaattttggtggtaataattaaagtatcgtagttaggagttagtcgaatatatgtttttttttttttattagattgaattagagtgttgattttggttatattaatgttataaatttttttatagtttgtttgatttggtgtttgttggttttaatatttatagtgaatataagtaggttgttgttttttattttttttatagtttatttagtggttagcggaaatttgatgataatatggtggttaagtttattttttttgggggtgtttttttaaggatatttgggttgttttcggagttatagtgttttgggtcgtcggaaggtgggtgatatgtggattttgttttttttgtggttgtggatattttttaatattgtttttttggttttgtaaagttttcgttttggtttcggttttaggaggggtaggagttttttttttcgtttttggtattattttatgaaaagggtttagattaagatttttgattgagttattttaaagtaagttgtaagatttatgatattagattattaaatattttattatatattttttaagaataagaattaatattattatattaaagaaaataaataattttataatattatttaaagtttttttatgtttaaatatttttattttttttagtatatttttgtatttattttttatagtttgtttttttaaaatgtttattcgttgtttttggttatgtttttttaattatttataatttataataattaatttatttttttttttttagaatggtattatttgttttagagatgaggttaaatatttgtggaattttttttatattgaatttattatattattttttttgatgtttttaattttttttttttaattgttatgttttttaaggatttatgtagttttgggttaaatatttggtagtaatgtttataggaggagttgtgatcgtatatttattatattaggaggtatataaagtttagggttattaggattttttttgattttatatagttaaatttattttgattttttagagatgtagaattatgggttgggtgtttagtgggtatgagtgtgatattttggtaataggaggttttgttattttttttattttttacgagttttagttttttatattttgaggttttgagttttagatttttaattattaggttaggtttttttagatttagattttttttttgttttttttagttttattttgttttgtatttattttcggattattttttttttataggtttagtttttgagtgtttttattttttaaataagtatttttatttaggagtaatttttttattagaggatattagttatgtttggaaaaatgttttgttgttatgattggagtgaggaggaggtgttattagtattttgtggggaatgattagggatgttgaatattttgtagtgtataagttagtttaattatttatataatagataattatttagttttaatattaagattgttaagggtaaggaggtttgttaggatttttttttttttgagtataagtttttttgaattgagggatattttgaaggaaaagtgtggttttattttagttattttttttttttttggagttttatttgtatgtttgtagtgtttaggtttgtaatttggggtttaggaatttatttttttatgagattgtatgtagaagtgatgatatgtgtatata

SEQ ID NO: 112 - DNA, 6944 bp, Artificial Sequence
  chemically treated genomic DNA (Homo sapiens)
tgtgtgtatatattattatttttgtatgtagttttatgggaaggtgggtttttggattttaggttataggtttaagtattataggtatatagatggagttttagggaagggagagatgattggggtgggattatattttttttttagggtgttttttagtttaaggaagtttgtatttaagggagagaaagttttggtaggtttttttatttttggtaattttggtattggggttggataattatttgttatgtgggtgattgggttgatttgtgtattgtaggatgtttagtatttttggttattttttataagatgttggtagtattttttttttattttagttatggtaataaaatatttttttagatatagttaatgttttttggtgggaaaattgtttttggatgagaatatttgtttgagaggtagagatatttaggagttgggtttgtagagggaaagtgattcggaagtagatataaagtagagtggggttggagaagataggaagggagtttaggtttggaggggtttggtttgatggttgaaggtttggagtttagaattttagggtatggggaattaaagttcgtgaggaatggggagagtggtagaattttttattgttagaatattatatttatatttattaaatatttagtttatggttttgtatttttgggaagttaggataaatttggttgtatggggttagaaagagttttggtaattttaggttttgtgtgttttttgatgtgatgaatgtgcggttatagttttttttgtaaatattgttgttaaatgtttaatttagagttatataggtttttaggaggtatagtagttagaggaaaaaagttaaaggtattaggggaaataatatgataaatttagtgtggagaagattttataggtatttggttttatttttgaaataggtaatgttattttaaaagaaaaaagatgggttgattgttatagattgtaggtaattaaagaaatataattaaaggtaacgagtggatattttaagaaaataagttataaaaaataggtataaaaatgtattgaaagaagtggagatatttgaatataaaaggattttaaataatattatggaattatttattttttttggtgtgataatgttggtttttatttttaggaggtgtgtgatgaagtatttagtggtttagtattatgggttttgtaatttattttagaatgatttagttaaaaattttaatttggattttttttataagatggtgttaagaacgaagaaggaagtttttgttttttttaaagtcgaagttaaagcgaaggttttgtaaggttaagaaggtagtgttgaaagatgtttatagttataaaaaaaataagatttatatgttatttatttttcggcggtttaagatattgtgatttcggaggtagtttaaatatttttggaagagtatttttaggagaaataagtttgattattatgttattattaagttttcgttgattattgagtaggttgtgaagaagatagaaaataatagtttatttgtgtttattgtggatgttaaagttaataagtattagattaaataggttgtgaagaagtttgtgatattgatgtggttaaagttaatattttgatttagtttgatggagagaggaaggtatatgttcgattggtttttgattacgatgttttggttgttgttattaaaattgggattatttaaattgagttaagttggttagttttaaatatatgtatatttttttattattaaaagaattttaatttttttatttattttttttttttatatatatatatatatatatatatttacgtgtatgttataaaaatatatttatttgtatttataaaaagatatatttttattttttatttttaaaatttatgtatgttcgtgaggtataagtgtaattttgttatattgatattttgttttttagttttatataaggaagttgttttatattatagagaaaatatttatgaataaattcgtattagttatagtgagaggtaatattttaaatagtttattttatgtttaagatatttaagttaaagaaatttaatagtatagttgagttttttttgtttttttttaatattttatttatattagggtttttgttttggagtgttatttttattagttgtgagagatattttagagttttgggtattgttagtgattggggtagaataaaaataggatttggttagagtttatagatgtggttagaggaattgtggggtgggtgagtttttttataggtttttgattataatattttaataattttagggattagttttttttattttatttgtagtttgagagtagttttttttgtttttatttatgggaagaaaatgttttgtgagaggttagaaaggaggtagggttataaggttttagagtaaatttttagtttttgattttagagaagtttttagaaaagtgtaattgtagatttagggtaggattaagaaatatgaagaaagtagatgtgggttttggattaattgtttttttgaggtttgttattagtagggatttttttttgtgatttgtgattgttgggattaggttttattattattataattatcgaagtgaagaatttgttttttatttttataggagttttataaatgagtaggtgttggtatatagggtttaggttgggtagatttatgagtgtggatggtgttttttagtaatgaggtagggtatatttttatttggggtttgtaatttttagtgggataagaaaatttagattttattttttatttttttttatttgagtttttttttttttatattatagtagcgattatagttttagtgattatagttttaaggataataaggttagtaacgatgtttacgatggggatggtgggttggggagattgttttgggaaaggaagggaaggtgaggggttttgatttttaggttttagttttgattttgttgaagagttttagaagggtttttgttttttttgagaaaagatatgatttttcgtttttttttttatttatttttttttttattttattttaggatgaggggttggggtagtttttcgtgttgtatatggtatgtgtatttttgtttttttttaggaggtattattatagcggtttatttttggaaggttttattttttgtaggtttggtttttataagttttgtgttttgggtttgtttttttttatttcgttgttaggttagcgtgattttcgtagggtagaagtttagggtttagtattttagggtggttttatggttagagatggggtggtgggtaacgtgtgtttttggaggatttgagaagagttagaaaatttaggtattttgtattttttatgggaaattttagtagtatttatgtgattaatttgagaatggataggatatttggggtggggaagggagtatagaatttagatattagtttggatatagatatttgggaaaattttttattttttggaaagttagagtttttgaggggggagtagggatttttggttttgatttaagtggaggtcgagggattggaattagagttttaaatatattgagtgtgaggtagagaataaaatttgagagaaaagttacggggtttaaggttgttggagggtttaaaggggatcgcggatcggtattttagggattgttttttttttatttttttagaaattttattttttaattgttttagagagtagggcggatttttatagttattttttggtatcggatttcgaaagttaggaagattttttttatttaggattagagggagggcgatattttagtattgggtttattttttttttaattttgtgcgaggttattttaagagatttataggagatagggaaggcgtttatggtttttggtatttgcgcgttgtagcgttttttttttattttttaagtatttgcggagtaattttaggtattcgttttttaggtaggttttgaatttttttgtatatttttttgttttatagaagcgttgggtgatttgagttacggtgttcgtcgcggtttaggagcgtaggttttcgtttagggagatgtaatttttgtcgtcgtacgcgtgttggtgatattcgcggaggaggcgttcgtcgggttttatgtcgtagttatttattttttggagggtgtgagattttagtcggttttcgtagttagtttcgtttagttagtttcgtttttttttcgtttaattcgcggggattttggtttaaattgaaaatgaatttgggtaaaggcgtttgggattttttcgggtggagggtttgggcgggtttcgttgtttcggggtagatttcggattcggagattttgagggattcgggcggttcgtggcggatggggggtggtcgtgatttgcgttttcggtcgggtttatttattagtttcgttttggttgtagcggcggagtaggttttttagggttattcggttagtttgtgcgttggttttggcgtattttgtggtttatttttaatattgcggttttttttgttttatttacggttttcgcggttttattttcggaatcgcggcgtcgttgtcgaatcgtaggaattgcgtgtcgtttacgtattttacggcgatgtagcggggtttttcgcggtcgggtcgcgatatagcggtgttgaaatattttaaggagtgggagtttgggggcgaggaggggttgagattcgttagattttttttcggaggcggttttttgagttttgcgtttttatcgggcgggttttttatttttttttatagaggtcgtttttttttggatttcgtatttattcgtttaagtatcggttagggttagggtttttgagagtagtaggaggaggtttcggggcgttatgattttaattttcgcgtttgggaaaaatatgagtttcgcggggtgcgtgggattttagaatttgggaattgcggcgatattgattggtttttttagaaacgcgacgtttaatgggagtgagaaatggggtcgcgttatgagtatttaggaagaaggatttgatacgggttgggagagaaagagaaattttggggagatggggaatttttaatattgagttttttaattttagatatcgtttcggggtttgagtttttgagagttatttttggggttttgggattttgtttttttttttttttttttttttttgtgtagggtgtgttttaatgtttttttgagttttcgttcgggggttgagaaattagggagaaattttcggtatggatttagtttatttttttttattatttatttcgaaattttagttttttgattgaattttttgttttttattttatatttggatttttcggatttttttggaagaaaatttattttaaggagtttggtgttagataatgaatttgttttgagaatgaaggtgtagagatagtttttttttttttttttttttttttttttttttttttttttttttttttttttttttttttttttttttttttttttttttttttttttttttttttttttttttttttttttttttttttttttttttttttttttttttttttttttttttttttttttttttttttttttttttttttttttttgttttttttcgttttttttttttttttttttggaaaagttgtatttgagtatatgaaataggatagagattagttttttttttttttttttttttttattagttgtagtgagtagtagaattttggtaatttttgaattattaggaattttttttttttttttttttttttttttttttttttttttttttttgagacggagtttttttttgtcgtttaggttggagtgtagtggcgcgatttcggtttattgtaagttttgcgtttcgggtttacgttatttttttgttttagtttttcgagtagttgagattatagatgttcgttattacgttcggttaatttttttgtagagacgggttttatcgtgttagttaggatggtttcgattttttgatttcgtgattttttcgtttcggttttttaaagtgttgcgattataggtatgagttatcgcgttcgattaattaggaattttatgtgtaaaaattgttattttggttttttgatatataaatgtgtttaaatgtattatagttgtataatttttagagtttttaagttttgtttttttagattatgtatttgtgatttttgttgtattttaaaattatttttattttatagttttgagtttttgtgggagtttaggatattttttgataatataaagtagtataacgtgtgattgtatattgtaattaggagttaatatatttatttattttaaagttgtaagtgtttaacgtagttataatgttttttattagtgtttatgtattttttgtttttaggaagtattcgtatttaagtggtgtgtatgttttattggaatatttagtatttttttaaatttgaaaaaaagtagaaaaagtaattaatttttaggtagttttatataaggtgttaaaggttaaatgtaaggaatattttgttaggttttgtagatggatgtattaaaaatttataaaataatgtgtttaaagttaagaattttgttgtttttaaattttgtttttttgttttttttttttattttttgtttttttagttttttttttcgttttttttattttttaggtttttttttttttttagtttttattattttgttatttttgaatagtggttttagtattgttttattatttgttatttgagtgttttttttatagtggttttgttattgtgagttaaagtgtgtcgtttttttatttaaaatattttagtggttttatttcggttttgtgaagtttt

SEQ ID NO: 113 - DNA, 19 bp, Artificial Sequence
  TGFA primer
ggtttgtttgggaggtaag

SEQ ID NO: 114 - DNA, 18 bp, Artificial Sequence
  TGFA primer
ccccctaaaaacacaaaa

SEQ ID NO: 115 - DNA, 18 bp, Artificial Sequence
  TGFA detection oligomer
gtttttttcgttttagag

SEQ ID NO: 116 - DNA, 18 bp, Artificial Sequence
  TGFA detection oligomer
gttttttttgttttagag
